(19) United States
(12) Patent Application Publication
(10) Pub. No.: US 2024/0132880 A1
(43) Pub. Date: Apr. 25, 2024

(54) TRANSCRIPTIONAL PROGRAMMING IN A BACTEROIDES CONSORTIUM

(71) Applicant: Georgia Tech Research Corporation, Atlanta, GA (US)

(72) Inventor: Corey J. Wilson, Atlanta, GA (US)

(21) Appl. No.: 18/490,880

(22) Filed: Oct. 19, 2023

Related U.S. Application Data
(60) Provisional application No. 63/380,434, filed on Oct. 21, 2022.

(51) Int. Cl. C12N 15/11; C12N 9/22; C12N 15/10

(52) U.S. Cl. CPC C12N 15/11; C12N 9/22; C12N 15/102; C12N 2310/20

(57) ABSTRACT

The present disclosure provides nucleic acid constructs and cell compositions for transcriptionally modifying a bacterial population within the gastrointestinal tract of a subject, and methods of use thereof.

### CROSS-REFERENCE TO RELATED APPLICATIONS

[0001] This application claims the benefit of U.S. Provisional Application No. 63/380,434, filed on Oct. 21, 2022, which is expressly incorporated herein by reference in their entirety.

### STATEMENT REGARDING FEDERALLY SPONSORED RESEARCH

[0002] This invention was made with government support under Grant No. 1934836 awarded by the National Science Foundation. The government has certain rights in the invention.

### REFERENCE TO SEQUENCE LISTING

[0003] A Sequence Listing conforming to the rules of WIPO Standard ST.26 is hereby incorporated by reference. Said Sequence Listing has been filed as an electronic document via Patent Center in ASCII format encoded as XML. The electronic document, created on Oct. 17, 2023, is entitled “10034-187US1_ST26.xml”, and is 583,550 bytes in size.

### FIELD

[0004] The present disclosure relates to nucleic acid constructs and uses thereof.

### BACKGROUND

[0005] The human gastrointestinal (GI) tract harbors a microbial ecosystem of enormous complexity that contributes significantly to the health of the host. Evidence continues to emerge connecting the GI microbiota with health and disease states not only in the immediate vicinity of the GI tract, but systemically as well. Many studies involving the GI microbiota leverage metagenomic data to investigate how its highly variable composition across age and demographics can be connected to health conditions. In contrast, several studies have investigated the impact of individual species on the microbiota through functional genomics and targeted manipulation of GI communities. As the understanding of the gut microbiota expands in scope and depth, it is conceivable to engineer intelligent microbial consortia that reside in the human body. However, the vast majority of microbes inhabiting the GI tract are obligate anaerobes that are not readily amenable to genetic manipulation. This poses a challenge to synthetic biologists who seek to reprogram these microbes to perform useful functions beyond native capabilities. Therefore, what is needed are compositions and cells for programming GI microbiota.

### SUMMARY

[0006] The present disclosure provides constructs and cell compositions for reprogramming a GI microbiome. The present disclosure also provides methods using constructs and cell compositions to modify and/or monitor a GI microbiome.

[0007] In one aspect, disclosed herein is a construct comprising a plurality of nucleic acid sequences encoding a first group of one or more regulatory core domains, a second group of one or more regulatory core domains, one or more DNA binding domains, wherein the first group of the one or more regulatory core domains and the second group of the one or more regulatory core domains are each linked to one of the DNA binding domains, and one or more DNA operator elements, wherein the one or more DNA operator elements are each specifically recognized by one of the DNA binding domains.

[0008] In some embodiments, the construct further comprises SEQ ID NO: 31, SEQ ID NO: 32, SEQ ID NO: 33, SEQ ID NO: 34, SEQ ID NO: 35, SEQ ID NO: 36, SEQ ID NO: 37, SEQ ID NO: 38, SEQ ID NO: 39, SEQ ID NO: 40, SEQ ID NO: 41, SEQ ID NO: 42, SEQ ID NO: 43, SEQ ID NO: 44, SEQ ID NO: 45, SEQ ID NO: 46, SEQ ID NO: 47, SEQ ID NO: 48, SEQ ID NO: 49, SEQ ID NO: 50, SEQ ID NO: 51, SEQ ID NO: 52, SEQ ID NO: 53, SEQ ID NO: 54, SEQ ID NO: 55, SEQ ID NO: 56, SEQ ID NO: 57, SEQ ID NO: 58, SEQ ID NO: 59, SEQ ID NO: 60, SEQ ID NO: 61, SEQ ID NO: 62, SEQ ID NO: 63, SEQ ID NO: 64, SEQ ID NO: 65, SEQ ID NO: 66, SEQ ID NO: 67, SEQ ID NO: 68, or variants thereof.

[0009] Ins some embodiments, the plurality of nucleic acid sequences comprises any combination of SEQ ID NO: 1, SEQ ID NO: 2, SEQ ID NO: 3, SEQ ID NO: 4, SEQ ID NO: 5, SEQ ID NO: 7, SEQ ID NO: 8, SEQ ID NO: 9, SEQ ID NO: 10, SEQ ID NO: 11, SEQ ID NO: 12, SEQ ID NO: 13, SEQ ID NO: 14, SEQ ID NO: 15, SEQ ID NO: 20, SEQ ID NO: 21, SEQ ID NO: 22, SEQ ID NO: 23, SEQ ID NO: 24, SEQ ID NO: 25, SEQ ID NO: 26, SEQ ID NO: 27, SEQ ID NO: 28, or variants thereof.

[0010] In some embodiments, the first group of one or more regulatory core domains comprises at least one repressor or at least one anti-repressor, or a combination thereof. In some embodiments, the second group of one or more regulatory core domains comprise at least one repressors, at least one anti-repressors, or a combination thereof.

[0011] In some embodiments, the first group of one or more regulatory core domains are specifically recognized by a first agent. In some embodiments, the first agent is isopropyl-β-D-1-thiogalactopyranoside.

[0012] In some embodiments, the second group of one or more regulatory core domains are specifically recognized by a second agent. In some embodiments, the second agent is D-ribose.

[0013] In some embodiments, the first and second group of the one or more regulatory core domains are linked to a same DNA binding domain. In some embodiments, the first and second group of the one or more regulatory core domains are linked to different DNA binding domains.

[0014] In some embodiments, the construct comprises a plurality of nucleic acid sequences encoding a first group of two regulatory core domains, a second group of two regulatory core domains, three DNA binding domains, wherein the first group of the regulatory core domains and second group of the regulatory core domains are each linked to one of the three DNA binding domains, and three DNA operator elements that are each specifically recognized by one of the three DNA binding domains.

[0015] In some embodiments, the construct further comprises a nucleic acid sequence encoding a reporter. In some embodiments, the construct further comprises a nucleic acid sequence encoding a dead Cas9 endonuclease (dCas9) and a single guide RNA (sgRNA).

[0016] In some embodiments, the nucleic acid sequence encodes any combination of SEQ ID NO: 6, SEQ ID NO: 16, SEQ ID NO: 17, SEQ ID NO: 18, SEQ ID NO: 19, or variants thereof. In some embodiments, the construct further comprises SEQ ID NO: 69, SEQ ID NO: 70, SEQ ID NO: 71, SEQ ID NO: 72, SEQ ID NO: 73, SEQ ID NO: 74, SEQ ID NO: 75, SEQ ID NO: 76, SEQ ID NO: 77, SEQ ID NO: 78, SEQ ID NO: 79, SEQ ID NO: 80, SEQ ID NO: 81, or variants thereof.

[0017] In one aspect, disclosed herein is a cell comprising a construct comprising a plurality of nucleic acid sequences encoding a first group of one or more regulatory core domains, a second group of one or more regulatory core domains, one or more DNA binding domains, wherein the first group of the one or more regulatory core domains and the second group of the one or more regulatory core domains are each linked to one of the DNA binding domains, and one or more DNA operator elements, wherein the one or more DNA operator elements are each specifically recognized by one of the DNA binding domains.

[0018] In some embodiments, the cell comprises the construct of any preceding aspect.

[0019] In some embodiments, the cell is a bacterial cell. In some embodiments, the bacterial cell is a bacterium of gastrointestinal tract microbiota. In some embodiments, the bacterial cell is a species of Bacteroides genus selected from B. thetaiotaomicron (Bt), B. fragilis (Bf), B. vulgatus (Bv), B. ovatus (Bo), or B. uniformis (Bu).

[0020] In one aspect, disclosed herein is a method of modifying a gastrointestinal tract microbiome in a subject, comprising administering to the subject an effective amount of a cell comprising a construct comprising a plurality of nucleic acid sequences encoding a first group of one or more regulatory core domains, a second group of one or more regulatory core domains, one or more DNA binding domains, wherein the first group of the one or more regulatory core domains and the second group of the one or more regulatory core domains are each linked to one of the DNA binding domains, and one or more DNA operator elements, wherein the one or more DNA operator elements are each specifically recognized by one of the DNA binding domains.

[0021] In some embodiments, the method of modifying a gastrointestinal tract microbiome in a subject, comprising administering to the subject an effective amount of the cell of any preceding aspect, wherein the cell comprises the construct of any preceding aspect.

[0022] In one aspect, disclosed herein is a method of monitoring a gastrointestinal tract microbiome in a subject, comprising administering to the subject an effective amount of a cell comprising a construct comprising a plurality of nucleic acid sequences encoding a first group of one or more regulatory core domains, a second group of one or more regulatory core domains, one or more DNA binding domains, wherein the first group of the one or more regulatory core domains and the second group of the one or more regulatory core domains are each linked to one of the DNA binding domains, and one or more DNA operator elements, wherein the one or more DNA operator elements are each specifically recognized by one of the DNA binding domains.

[0023] In some embodiments, the method of monitoring a gastrointestinal tract microbiome in a subject, comprising administering to the subject an effective amount of the cell of any preceding aspect, wherein the cell comprises the construct of any preceding aspect.

### BRIEF DESCRIPTION OF FIGURES

[0024] The accompanying figures, which are incorporated in and constitute a part of this specification, illustrate several aspects described below.

[0025] FIGS. 1A, 1B, 1C, 1D, and 1E show the regulatory performance of transcription factors in Bacteroides species. FIG. 1A shows the initial set of transcription factors (TFs) tested in B. thetaiotaomicron (left box). The four signal-distinct regulatory core domains (RCDs) are shown with their repressor and anti-repressor cartoons. The cognate ligand for each RCD is shown as a colored hexagon. Each RCD can be paired with one of seven DNA-binding domains (DBDs) that each recognize and bind to a unique cognate DNA operator. Each DBD is abbreviated with a three-letter code where the three letters correspond to the residues located at positions 17, 18, and 22 of the LacI DBD. Cognate DBD-operator interactions are shown as the same color. The reduced set of functional TFs in B. thetaiotaomicron is shown in the middle box. The repressor and anti-repressor phenotypes are illustrated in the right boxes. FIG. 1B shows the dynamic range of LacI (I⁺) TFs with alternate DNA recognition (ADR) when paired with cognate operators. Regulated promoters are illustrated at the bottom of the figure. Each box corresponds to the inducible promoter shown in the left columns when deployed in the Bacteroides species labeled below (B. thetaiotaomicron (Bt), B. fragilis (Bf), B. vulgatus (Bv), B. ovatus (Bo), B. uniformis (Bu)). The dynamic range of each promoter is presented next to its corresponding box which is shaded according to the legends at the top of each panel. Strains harboring inducible promoters were grown in the absence and presence of 10 mM inducer and assayed for luciferase activity (Methods). Dynamic range is presented as the high output state divided by the low output state. FIG. 1C shows the dynamic range of RbsR (R⁺) transcription factors when paired with cognate operators. FIG. 1D shows the dynamic range of anti-LacI (I^{A}) transcription factors when paired with cognate operators. FIG. 1E show the dynamic range of anti-RbsR (R^{A}) transcription factors when paired with cognate operators. See Supplementary FIGS. 1-2 for extended data. Source data are provided as a Source Data file. Data represent the average of n=6 biological replicates.

[0026] FIGS. 2A, 2B, 2C, and 2D show the single-promoter logic gates constructed in B. thetaiotaomicron. FIG. 2A shows the AND gate is constructed by directing two repressors to the same operator. We refer to the genetic architecture of directing two or more TFs to a single operator as series-parallel (SE-PA). Bar charts show luciferase activity presented as luminescence per colony forming unit (CFU) (Methods). Each bar corresponds to the ligand condition shown to its left (empty, no ligand; grey, IPTG; purple, D-ribose; grey and purple, IPTG and D-ribose). Strains harboring logic gates were grown in the presence of all combinations of both inducers (each at a final concentration of 10 mM) and assayed for luciferase activity (Methods). Adjacent to each bar chart, the fold-change is presented (blue for repression and purple for anti-repression). FIG. 2B shows the NOR gate constructed by directing two anti-repressors to the same operator. FIG. 2C shows the A NIMPLY B gate is constructed by directing an I⁺ and a R^{A} to the same promoter. FIG. 2D shows the B NIMPLY A gate is constructed by directing an I^{A} and a R⁺ to the same promoter. Source data are provided as a Source Data file. Data represent the average of n=6 biological replicates. Error bars correspond to the SEM of these measurements.

[0027] FIGS. 3A, 3B, 3C, 3D, 3E, 3F, and 3G show the logic gates and circuit compression in five Bacteroides species. FIG. 3A shows the degree of AND gate circuit compression compared to published circuits (left) along with AND gate performance in five Bacteroides species (right). Degree of circuit compression is represented by the number of regulated promoters required to construct the logic gate (TP, transcriptional programming; CP, Cello programming; WP, multicellular wires programming; NP, Boolean NOR programming). Note, the gray and (*) bars in the circuit compression summaries indicate an apparent or ad hoc gate. Strains harboring circuits were grown in the presence of all combinations of both inducers (each at a final concentration of 10 mM) and assayed for luciferase activity (Methods). FIG. 3B shows the NOR gate compression and performance in five Bacteroides. FIG. 3C shows the OR gate compression and performance in five Bacteroides (see Supplementary FIG. 15G for corresponding genetic architecture). FIG. 3D shows the NAND gate compression and performance in five Bacteroides (see Supplementary FIG. 15H for corresponding genetic architecture). FIG. 3E shows the XNOR gate compression and performance in five Bacteroides (see Supplementary FIG. 15I for corresponding genetic architecture). FIG. 3F shows the XOR gate compression and performance in five Bacteroides. FIG. 3G shows the wiring diagram for XOR construction using transcriptional programming (top) compared to Bt Cello programming (bottom). Regulated promoters used for each logic gate are shown in the bottom right corner of each left-hand box (also see FIG. 1 for more detail). Source data are provided as a Source Data file. Data represent the average of n=6 biological replicates. Error bars correspond to the SEM of these measurements.

[0028] FIGS. 4A, 4B, 4C, 4D, 4E, and 4F show the coupling transcriptional programming with CRISPR interference. FIG. 4A shows the wiring diagram for NanoLuc knockdown based on a BUFFER gate controlling a sgRNA (top). I⁺_{YQR} was used to regulate a sgRNA targeting the NanoLuc gene. Strains harboring the circuit were grown in the absence and presence of 10 mM IPTG and assayed for luciferase activity (bottom) (Methods). Dynamic range is illustrated with shading according to the legend below the graph (purple representing anti-induction, blue representing induction) and is calculated as described previously. FIG. 4B shows the wiring diagram for NanoLuc knockdown based on a NOT gate controlling a sgRNA (top). I^{A}_{YQR} was used to regulate a sgRNA targeting the NanoLuc gene. Strains harboring the circuit were assayed as in FIG. 4A to determine performance (bottom). FIG. 4C shows the wiring diagram of CRISPRi circuit targeting endogenous SusC-like genes. Strains were created with X⁺_{YQR} (X=I or R) regulating a sgRNA specific to the SusC homologue of interest. FIG. 4D shows the cartoon of PUL organization, highlighting the function of the SusC-like importer. Colors of proteins and complexes correspond to the genes shown in c and are listed in the legend at the top right corner. FIG. 4E shows the growth curves of B. ovatus (left) and B. uniformis (right) harboring circuits shown in c with I⁺_{YQR} as the sgRNA regulator. Strains harboring CRISPRi circuits were grown in the absence and presence of 10 mM IPTG in minimal media containing inulin as the only carbon source (Methods). FIG. 4F is similar to FIG. 4E, but shows the sgRNA regulator is now R⁺_{YQR}. Strains harboring these circuits were grown in the absence and presence of 1 mM D-ribose in inulin minimal media. Source data are provided as a Source Data file. For luciferase assays, data represent the average of n=6 biological replicates. For OD600 growth curves, data represent the average of n=3 biological replicates. Error bars correspond to the SEM of these measurements.

[0029] FIGS. 5A, 5B, 5C, 5D, and 5E show the advanced regulation of endogenous carbon utilization genes. FIG. 5A shows the wiring diagram for an AND gate controlling a sgRNA output targeted to an endogenous gene (left). The sgRNA is the same as in FIG. 4E. Growth curves are shown for B. uniformis harboring this circuit when grown in inulin minimal media in the presence of all combinations of both inducers (10 mM IPTG and 1 mM D-ribose) (right). FIG. 5B is similar to 5A, but shows a NOR gate controlling a sgRNA targeted to the B. ovatus SusC-like gene involved in inulin import. FIG. 5C is similar to 5B, but shows an OR gate controlling the sgRNA output. Source data are provided as a Source Data file. For OD600 growth curves, data represent the average of n=3 biological replicates. Error bars correspond to the SEM of these measurements.

[0030] FIGS. 6A, 6B, 6C, 6D, and 6E show the controlling community composition in co-culture. FIG. 6A shows the demonstration of asymmetric programming of two species in co-culture. The B. uniformis strain described in FIG. 5A was co-cultured with the B. ovatus strain described in FIG. 5C in inulin minimal media. Each strain was intentionally constructed to harbor a different antibiotic resistance so that they could be differentiated when plated on BHI agar with appropriate antibiotics. The left bar chart shows the density of the B. uniformis strain over time as calculated by dilution plating (Methods). The right bar chart shows the density of B. ovatus over time. Four co-cultures were grown in parallel, each with a different combination of inducers. White bars represent medium with no ligand, grey bars represent medium with 10 mM IPTG, purple bars represent medium with 1 mM D-ribose, and striped bars represent medium with both inducers. FIG. 6B shows a cartoon illustrating the co-culture composition with no ligand present in the medium. FIG. 6C shows a cartoon illustrating the co-culture composition with IPTG present in the medium. FIG. 6D shows a cartoon illustrating the co-culture composition with D-ribose present in the medium. FIG. 6E shows a cartoon illustrating the co-culture composition with both IPTG and D-ribose present in the medium. Source data are provided as a Source Data file. Data represent the average of n=3 technical replicates (see FIG. 16 for additional data and information). Error bars correspond to the SEM of these measurements.

[0031] FIGS. 7A, 7B, 7C, 7D, 7E, and 7F show the sequential programming in co-culture. FIG. 7A shows a co-culture composed of B. thetaiotaomicron and B. ovatus harboring different logic gates. B. thetaiotaomicron integrated with an AND gate was grown in the same TYG culture as B. ovatus integrated with a NOR gate (both gates regulating luciferase expression). Co-cultures were grown in the presence of all combinations of inducers (each at a final concentration of 10 mM) yielding four total cultures which were independently assayed for luciferase activity (Methods). FIG. 7B shows a sequential programs derived from the “No Ligand” culture in FIG. 7A. The initial co-culture was used to seed fresh media containing additional inducers (i.e., IPTG, ribose, or both ligands). These new co-cultures were grown and assayed for luciferase activity (FIG. 7F, left bar chart). FIG. 7C shows the sequential program derived from the “+IPTG” culture in FIG. 7A. The initial co-culture was used to seed fresh medium containing both ligands. This new co-culture was subsequently assayed for luciferase activity (FIG. 7F, middle bar chart). FIG. 7D shows the sequential program derived from the “+Ribose” culture in FIG. 7A. The initial co-culture was used to seed fresh medium containing both ligands. This new co-culture was subsequently assayed for luciferase activity (FIG. 7F, right bar chart). FIG. 7E shows the luciferase activity of co-cultures on day 1. Numbered circles correspond to the co-cultures illustrated in FIG. 7A. FIG. 7F shows the luciferase activity of co-cultures on day 2. Numbered circles correspond to the co-cultures illustrated in FIGS. 7B, 7C, and 7D. Source data are provided as a Source Data file. Data represent the average of n=3 biological replicates. Error bars correspond to the SEM of these measurements.

[0032] FIGS. 8A and 8B show the components of modular transcription factors used for transcriptional programming. FIG. 8A shows the summary of transcription factor architecture and nomenclature used in this study. Each transcription factor is composed of a regulatory core domain (RCD) that binds to a unique small molecule ligand and a DNA-binding domain (DBD) that binds to a specific operator (op). The cognate ligand for each RCD is shown as a colored hexagon. The repressor and anti-repressor phenotypes are illustrated in the middle. Transcription factors utilize alternate DNA recognition (ADR) which is comprised of 5 DBDs that recognize 5 unique operators which are color-coded. Each DBD is abbreviated with a three-letter code where the three letters correspond to the residues located at positions 17, 18, and 22 of the LacI DBD. Each operator is abbreviated with a three-letter code that corresponds to the critically-recognized bases of the synthetic DNA sequence. FIG. 8B shows the full panel of 20 transcription factors used. All 20 transcription factors are illustrated with corresponding abbreviations used.

[0033] FIGS. 9A and 9B show the regulatory performance of transcription factors in Bacteroides species. Extended data related to FIG. 1. Low and high states for every cognate TF-promoter pair are shown for the five Bacteroides species. Bar pairs correspond to the squares in FIG. 1 with the dynamic range being the ratio of high and low states. To direct each transcription factor, in-tandem operator-promoters composed of two DNA operators were used, one intercalated between the −33 and −7 hexamer and the other proximal to the TSS, also see Example 2. Each set of transcription factors for a given logical operation could be independently directed to five separate cognate operator-promoters—i.e., PO1, Ptta, Pttg, Pagg, or Pgac—without cross interaction (also see FIG. 10). Data represent the average of n=6 biological replicates. Error bars correspond to the SEM of these measurements. Induction of each promoter was determined to be statistically significant (P<0.001) using Welch's two-tailed unequal variances t-test. Exact P-values can be found in the Source Data file.

[0034] FIGS. 10A, 10B, 10C, 10D, 10E, and 10F show the demonstration of orthogonality between DNA-binding domains and synthetic operators. FIG. 10A shows the PO1 orthogonality test. The 16 non-cognate TFs were tested for their ability to regulate PO1. Separate strains were created harboring the inducible promoter and each of the 16 non-cognate TFs. These strains were grown in the absence and presence of inducer and assayed for luciferase activity (Methods). The bars on the far right correspond to a strain harboring the promoter but no TF, serving as a constitutive control. FIG. 10B shows the Pagg orthogonality test. FIG. 10C shows the Ptta orthogonality test. FIG. 10D shows the Pttg orthogonality test. FIG. 10E shows the Pgac orthogonality test. FIG. 10F shows the illustration of the 20 transcription factors used in this study. Data represent the average of n=6 biological replicates. Error bars correspond to the SEM of these measurements.

[0035] FIGS. 11A, 11B, 11C, 11D, 11E, and 11F show the transcription factor sensitivity and OD-CFU comparison. FIG. 11A shows the dose response curve for I⁺_{YQR} regulating PO1 in B. thetaiotaomicron. Cells were grown in TYG medium containing various concentrations of IPTG and assayed for luciferase activity (Methods) to assess transcription factor sensitivity. FIG. 11b shows the dose response curve for R⁺_{YQR} regulating PO1 in B. thetaiotaomicron. Cells were grown in TYG medium containing various concentrations of D-ribose and assayed for luciferase activity. FIG. 11C shows the dose response curve for I^{A}_{YQR} regulating PO1 in B. thetaiotaomicron. Cells were grown in TYG medium containing various concentrations of IPTG and assayed for luciferase activity. FIG. 11D shows the dose response curve for R^{A}_{YQR} regulating PO1 in B. thetaiotaomicron. Cells were grown in TYG medium containing various concentrations of D-ribose and assayed for luciferase activity. FIG. 11E shows the autoluminescence of wildtype Bacteroides. Each species was grown in TYG medium and assayed for luminescence (Methods). FIG. 11F shows the OD-CFU curve. An example plot of OD600 of wildtype B. thetaiotaomicron grown in TYG medium converted to colony forming units (CFU). Cultures were grown for 16 hours with samples taken at regular intervals. Samples were serially diluted and plated on BHI agar to determine CFU. For luciferase assays, data represent the average of n=6 biological replicates. Error bars correspond to the SEM of these measurements. For OD-CFU curves, data represent the average of n=3 biological replicates. Error bars correspond to the SEM of these measurements.

[0036] FIGS. 12A, 12B, 12C, and 12D show the additional single-promoter logic gates constructed in B. thetaiotaomicron. FIG. 12A shows the additional AND gates created with different promoters. Each ligand condition is compared to the ON state with the corresponding fold-change in luciferase activity shown below. Cultures were assayed as described in FIG. 2. The ADR of the transcription factors used in each circuit are shown to the right of each row. FIG. 12B shows the additional NOR gates created with different promoters. Each ligand condition is compared to the ON state with the corresponding fold-change in luciferase activity shown below. FIG. 12C shows the additional A NIMPLY B gates created with different promoters. Each ligand condition is compared to the ON state with the corresponding foldchange in luciferase activity shown below. FIG. 12D shows the additional B NIMPLY A gates created with different promoters. Each ligand condition is compared to the ON state with the corresponding fold-change in luciferase activity shown below. Data represent the average of n=6 biological replicates. Error bars correspond to the SEM of these measurements.

[0037] FIGS. 13A, 13B, and 13C show a complete set of 16 logic gates and consortium transcriptional programming charts. FIG. 12A shows the full set of 16 two-input logic gates presented for reference. Each gate has a corresponding truth table shown to the right. FIG. 13B shows the gain-of-function programming chart for co-culture. Each logic gate in FIG. 13A is listed vertically and horizontally to denote their potential use in chassis cell 1 or 2, respectively. The four input conditions (ligand combinations) are shown adjacent to the first column. A yellow box indicates that under the specified ligand condition gene expression will be activated in the corresponding chassis cell (chassis 1 is on the left and chassis 2 is on the right for each 2×4 grid). A white box indicates gene expression is off. Considering the co-culture experiment described in FIG. 6, Bo is designated as chassis cell 1 and Bt as chassis cell 2. The red rectangle thus indicates the program used in FIG. 6. FIG. 13C shows the loss-of-function programming chart for co-culture. This chart is analogous to FIG. 13B, but in the context of CRISPRi knockdown of a target gene. A blue box indicates a state of high gene expression while a white box indicates a knockdown state of gene expression. Considering the co-culture experiment described in FIG. 7, Bo is designated as chassis cell 1 and Bu as chassis cell 2. The red rectangle indicates the program used in FIG. 7.

[0038] FIGS. 14A, 14B, 14C, and 14D show the circuit compression of NIMPLY and IMPLY gates. Related to FIG. 3, degree of compression (left) is presented alongside performance of logic gates in five Bacteroides species (right). FIGS. 14A and 14B show the NIMPLY gate compression and performance in five Bacteroides. See FIG. 2 and FIGS. 15E and 15F for more details regarding gate construction. Degree of circuit compression is represented by the number of regulated promoters required to construct the logic gate. Strains harboring circuits were grown in the presence of all combinations of both inducers and assayed for luciferase activity (Methods). FIGS. 14C and 14D show the IMPLY gate compression and performance in five Bacteroides. See FIGS. 81 and 8J for details regarding gate construction. Regulated promoters used for each logic gate are shown in the bottom right corner of each left-hand box (also see FIG. 1 for more detail). Data represent the average of n=6 biological replicates. Error bars correspond to the SEM of these measurements.

[0039] FIGS. 15A, 15B, 15C, 15D, 15E, 15F, 15G, 15H, 15I, 15J, 15K, and 15L show the direct comparison of compressed circuits with Cello programming (3 pages). Wiring diagrams are presented for all logic gates constructed in this study (left) as well as the equivalent logic gates reported in Nielsen et al. 3 (right). For circuits built in this study, the promoters correspond to those shown in FIG. 1. The binary truth table for the logic gate is shown to the right. For Cello circuits, X indicates a generic TF with the subscript indicating the cognate promoter it recognizes. Only X1 and X2 are used as inducible TFs, while all other TFs are used only to repress their cognate promoters. FIG. 15A shows the BUFFER gate. FIG. 15B shows the NOT gate. FIG. 15C shows the AND gate. FIG. 15D shows the NOR gate. The reported Cello NOR gate is shown (middle) along with a theoretical NOR gate constructed without tandem promoters (right). FIG. 15E shows the A NIMPLY B gate. FIG. 15F shows the B NIMPLY A gate. FIG. 15G shows the OR gate. The reported Cello OR gate is shown (middle) along with a theoretical OR gate constructed without tandem promoters (right). h, NAND gate. FIG. 15I shows the A IMPLY B gate. FIG. 15J shows the B IMPLY A gate. FIG. 15K shows the XOR gate. An additional apparent XOR gate reported by Taketani et al. 4 is displayed at the bottom. This circuit utilizes CRISPRi and requires a constitutively expressed dCas9 gene. X1 and X2 are inducible TFs that recognize P1 and P2, respectively. The circuit relies on sgRNAs to repress synthetic promoters and utilizes two output genes to achieve apparent XOR phenotype. FIG. 15L shows the XNOR gate.

[0040] FIGS. 16A, 16B, 16C, 16D, 16E, 16F, and 16G show the demonstration of SusC knockdown in B. thetaiotaomicron. FIG. 16A shows the wiring diagram of CRISPRi circuit targeting endogenous SusC-like gene. Strains were created with X⁺_{YQR} regulating a sgRNA specific to the B. thetaiotaomicron amylopectin SusC gene. FIG. 16B shows the cartoon of PUL organization, highlighting the function of the SusC-like importer. FIG. 16C shows the growth curves of B. thetaiotaomicron harboring circuit shown in a I⁺_{YQR} as the sgRNA regulator. FIG. 16D shows the growth curves of B. thetaiotaomicron harboring circuit shown in a with R⁺_{YQR} as the sgRNA regulator. Strains harboring CRISPRi circuits were grown in the absence and presence of inducer in minimal media containing amylopectin as the only carbon source (Methods). FIG. 16E shows the wiring diagram for an AND gate controlling the sgRNA targeting B. thetaiotaomicron amylopectin SusC gene (left). Growth curves of B. thetaiotaomicron harboring this circuit when grown in amylopectin minimal media containing all combinations of both inducers (right). For OD600 growth curves, data represent the average of n=3 biological replicates. Error bars correspond to the SEM of these measurements. FIGS. 16F and 16G are related to FIG. 6. The monoculture growth curve experiments presented in FIGS. 5A and 5C were repeated using dilution plating to quantify culture density instead of OD600. Data represent the average of n=3 technical replicates. Error bars correspond to the SEM of these measurements. This provides a direct comparison to the co-culture data presented in FIG. 6.

[0041] FIG. 17 shows the maps of plasmids constructed. Plasmid names correspond to descriptions in Table 1.

### DETAILED DESCRIPTION

[0042] The following description of the disclosure is provided as an enabling teaching of the disclosure in its best, currently known embodiment(s). To this end, those skilled in the relevant art will recognize and appreciate that many changes can be made to the various embodiments of the invention described herein, while still obtaining the beneficial results of the present disclosure. It will also be apparent that some of the desired benefits of the present disclosure can be obtained by selecting some of the features of the present disclosure without utilizing other features. Accordingly, those who work in the art will recognize that many modifications and adaptations to the present disclosure are possible and can even be desirable in certain circumstances and are a part of the present disclosure. Thus, the following description is provided as illustrative of the principles of the present disclosure and not in limitation thereof.

[0043] Reference will now be made in detail to the embodiments of the invention, examples of which are illustrated in the drawings and the examples. This invention may, however, be embodied in many different forms and should not be construed as limited to the embodiments set forth herein.

### Terminology

[0044] Unless defined otherwise, all technical and scientific terms used herein have the same meaning as commonly understood to one of ordinary skill in the art to which this disclosure belongs. The term “comprising” and variations thereof as used herein is used synonymously with the term “including” and variations thereof and are open, non-limiting terms. Although the terms “comprising” and “including” have been used herein to describe various embodiments, the terms “consisting essentially of” and “consisting of” can be used in place of “comprising” and “including” to provide for more specific embodiments and are also disclosed. As used in this disclosure and in the appended claims, the singular forms “a”, “an”, “the”, include plural referents unless the context clearly dictates otherwise.

[0045] The following definitions are provided for the full understanding of terms used in this specification.

[0046] The terms “about” and “approximately” are defined as being “close to” as understood by one of ordinary skill in the art. In one non-limiting embodiment the terms are defined to be within 10%. In another non-limiting embodiment, the terms are defined to be within 5%. In still another non-limiting embodiment, the terms are defined to be within 1%.

[0047] As used herein, the terms “may,” “optionally,” and “may optionally” are used interchangeably and are meant to include cases in which the condition occurs as well as cases in which the condition does not occur. Thus, for example, the statement that a formulation “may include an excipient” is meant to include cases in which the formulation includes an excipient as well as cases in which the formulation does not include an excipient.

[0048] “Composition” refers to any agent that has a beneficial biological effect. Beneficial biological effects include both therapeutic effects, e.g., treatment of a disorder or other undesirable physiological condition, and prophylactic effects, e.g., prevention of a disorder or other undesirable physiological condition. The terms also encompass pharmaceutically acceptable, pharmacologically active derivatives of beneficial agents specifically mentioned herein, including, but not limited to, a vector, polynucleotide, cells, salts, esters, amides, proagents, active metabolites, isomers, fragments, analogs, and the like. When the term “composition” is used, then, or when a particular composition is specifically identified, it is to be understood that the term includes the composition per se as well as pharmaceutically acceptable, pharmacologically active vector, polynucleotide, salts, esters, amides, proagents, conjugates, active metabolites, isomers, fragments, analogs, etc.

[0049] “Comprising” is intended to mean that the compositions, methods, etc. include the recited elements, but do not exclude others. “Consisting essentially of” when used to define compositions and methods, shall mean including the recited elements, but excluding other elements of any essential significance to the combination. Thus, a composition consisting essentially of the elements as defined herein would not exclude trace contaminants from the isolation and purification method and pharmaceutically acceptable carriers, such as phosphate buffered saline, preservatives, and the like. “Consisting of” shall mean excluding more than trace elements of other ingredients and substantial method steps for administering the compositions provided and/or claimed in this disclosure. Embodiments defined by each of these transition terms are within the scope of this disclosure.

[0050] An “increase” can refer to any change that results in a greater amount of a symptom, disease, composition, condition, or activity. An increase can be any individual, median, or average increase in a condition, symptom, activity, composition in a statistically significant amount. Thus, the increase can be a 1, 2, 3, 4, 5, 6, 7, 8, 9, 10, 15, 20, 25, 30, 35, 40, 45, 50, 55, 60, 65, 70, 75, 80, 85, 90, 95, 100%, or more, increase so long as the increase is statistically significant.

[0051] A “decrease” can refer to any change that results in a smaller amount of a symptom, disease, composition, condition, or activity. A substance is also understood to decrease the genetic output of a gene when the genetic output of the gene product with the substance is less relative to the output of the gene product without the substance. Also, for example, a decrease can be a change in the symptoms of a disorder such that the symptoms are less than previously observed. A decrease can be any individual, median, or average decrease in a condition, symptom, activity, composition in a statistically significant amount. Thus, the decrease can be a 1, 2, 3, 4, 5, 6, 7, 8, 9, 10, 15, 20, 25, 30, 35, 40, 45, 50, 55, 60, 65, 70, 75, 80, 85, 90, 95, or 100% decrease so long as the decrease is statistically significant.

[0052] “Inhibit,” “inhibiting,” and “inhibition” mean to decrease an activity, response, condition, disease, or other biological parameter. This can include but is not limited to the complete ablation of the activity, response, condition, or disease. This may also include, for example, a 10% reduction in the activity, response, condition, or disease as compared to the native or control level. Thus, the reduction can be a 10, 20, 30, 40, 50, 60, 70, 80, 90, 100%, or any amount of reduction in between as compared to native or control levels.

[0053] By “reduce” or other forms of the word, such as “reducing” or “reduction,” is meant lowering of an event or characteristic. It is understood that this is typically in relation to some standard or expected value, in other words it is relative, but that it is not always necessary for the standard or relative value to be referred to.

[0054] By “prevent” or other forms of the word, such as “preventing” or “prevention,” is meant to stop a particular event or characteristic, to stabilize or delay the development or progression of a particular event or characteristic, or to minimize the chances that a particular event or characteristic will occur. Prevent does not require comparison to a control as it is typically more absolute than, for example, reduce. As used herein, something could be reduced but not prevented, but something that is reduced could also be prevented. Likewise, something could be prevented but not reduced, but something that is prevented could also be reduced. It is understood that where reduce or prevent are used, unless specifically indicated otherwise, the use of the other word is also expressly disclosed.

[0055] The term “subject” refers to any individual who is the target of administration or treatment. The subject can be a vertebrate, for example, a mammal. In one aspect, the subject can be human, non-human primate, bovine, equine, porcine, canine, or feline. The subject can also be a guinea pig, rat, hamster, rabbit, mouse, or mole. Thus, the subject can be a human or veterinary patient. The term “patient” refers to a subject under the treatment of a clinician, e.g., physician.

[0056] A “promoter,” as used herein, refers to a sequence in DNA that mediates the initiation of transcription by an RNA polymerase. Transcriptional promoters may comprise one or more of a number of different sequence elements as follows: 1) sequence elements present at the site of transcription initiation; 2) sequence elements present upstream of the transcription initiation site and; 3) sequence elements down-stream of the transcription initiation site. The individual sequence elements function as sites on the DNA, where RNA polymerases and transcription factors that facilitate positioning of RNA polymerases on the DNA bind.

[0057] A “transcription factor” refers to a sequence-specific DNA-binding protein that controls the rate of transcription of genetic information from DNA to messenger RNA, by binding to a specific DNA sequence.

[0058] As used herein, a “transcription terminator” or a “terminator” refers to a segment of a nucleic acid sequence that marks the end of gene in genomic DNA during the transcription process, or gene expression. This sequence mediates or signals the end of transcription by providing signaling nucleotides in newly synthesized RNA transcripts that trigger an RNA polymerase to release the DNA and newly synthesized RNA.

[0059] The word “vector” refers to any vehicle that carries a polynucleotide into a cell for the expression of the polynucleotide in the cell. The vector may be, for example, a plasmid, a virus, a phage particle, or a nanoparticle. A “bacterial plasmid” is a small extrachromosomal DNA molecule that can be incorporated into another cell that is physically separated from the chromosomal DNA and is easily replicated. Once transformed into a suitable host, the vector may replicate and function independently of the host genome, or may in some instances, integrate into the genome itself. In some embodiments, the vector is a DNA construct containing a DNA sequence which is operably linked to a suitable control sequence capable of effecting the expression of the DNA in a suitable host cell. Such control sequences can include a promoter to effect transcription, an optional operator sequence to control such transcription, a sequence encoding suitable mRNA ribosome binding sites, and sequences which control the termination of transcription and translation.

[0060] The term “administer,” “administering”, or derivatives thereof refer to delivering a composition, substance, inhibitor, or medication to a subject or object by one or more the following routes: oral, topical, intravenous, subcutaneous, transcutaneous, transdermal, intramuscular, intra-joint, parenteral, intra-arteriole, intradermal, intraventricular, intracranial, intraperitoneal, intralesional, intranasal, rectal, vaginal, by inhalation or via an implanted reservoir. The term “parenteral” includes subcutaneous, intravenous, intramuscular, intra-articular, intra-synovial, intrasternal, intrathecal, intrahepatic, intralesional, and intracranial injections or infusion techniques.

[0061] Generally, “host” refers to an organism or cell into which a heterologous component (polynucleotide, polypeptide, other molecule, cell) has been introduced. As used herein, a “host cell” refers to an in vivo or in vitro eukaryotic cell, prokaryotic cell (e.g., bacterial or archaeal cell), or cell from a multicellular organism (e.g., a cell line) cultured as a unicellular entity, into which a heterologous polynucleotide or polypeptide has been introduced. In some embodiments, the cell is selected from the group consisting of: an archaeal cell, a bacterial cell, a eukaryotic cell, a eukaryotic single-cell organism, a somatic cell, a germ cell, a stem cell, a plant cell, an algal cell, an animal cell, in invertebrate cell, a vertebrate cell, a fish cell, a frog cell, a bird cell, an insect cell, a mammalian cell, a pig cell, a cow cell, a goat cell, a sheep cell, a rodent cell, a rat cell, a mouse cell, a non-human primate cell, and a human cell. In some cases, the cell is in vitro. In some cases, the cell is in vivo.

[0062] An “effective amount” is an amount sufficient to affect beneficial or desired results. An effective amount can be administered in one or more administrations, applications or dosages. “Effective amount” encompasses, without limitation, an amount that can ameliorate, reverse, mitigate, prevent, or diagnose a symptom or sign of a medical condition or disorder (e.g., HIV-1 infection). Unless dictated otherwise, explicitly or by context, an “effective amount” is not limited to a minimal amount sufficient to ameliorate a condition. The severity of a disease or disorder, as well as the ability of a treatment to prevent, treat, or mitigate, the disease or disorder can be measured, without implying any limitation, by a biomarker or by a clinical parameter.

[0063] The term “microbiota” refers to the range of microorganisms that may be commensal, symbiotic, or pathogenic found in and on all multicellular organisms, including plants and animals. These include bacteria, archaea, protists, fungi, and viruses and have been found to be crucial for immunologic, hormonal, and metabolic homeostasis of the host.

[0064] As used herein, “monitoring” refers to the actions of observing and checking the progress or quality of a treatment or procedure over a period of time. Herein, “monitoring” refers to the actions of observing and checking for changes to the GI tract microbiome following administration of a cell comprising a construct to (re)program to transcriptional regulation of the microbiome.

[0065] A “nucleotide” is a compound consisting of a nucleoside, which consists of a nitrogenous base and a 5-carbon sugar, linked to a phosphate group forming the basic structural unit of nucleic acids, such as DNA or RNA. The four types of nucleotides are adenine (A), cytosine (C), guanine (G), and thymine (T), each of which are bound together by a phosphodiester bond to form a nucleic acid molecule.

[0066] A “nucleic acid” is a chemical compound that serves as the primary information-carrying molecules in cells and make up the cellular genetic material. Nucleic acids comprise nucleotides, which are the monomers made of a 5-carbon sugar (usually ribose or deoxyribose), a phosphate group, and a nitrogenous base. A nucleic acid can also be a deoxyribonucleic acid (DNA) or a ribonucleic acid (RNA).

[0067] The terms “percent identity” and “% identity,” as applied to polynucleotide sequences, refer to the percentage of residue matches between at least two polynucleotide sequences aligned using a standardized algorithm. Such an algorithm may insert, in a standardized and reproducible way, gaps in the sequences being compared in order to optimize alignment between two sequences, and therefore achieve a more meaningful comparison of the two sequences. Percent identity for a nucleic acid sequence may be determined as understood in the art. (See, e.g., U.S. Pat. No. 7,396,664, which is incorporated herein by reference in its entirety). A suite of commonly used and freely available sequence comparison algorithms is provided by the National Center for Biotechnology Information (NCBI) Basic Local Alignment Search Tool (BLAST) (Altschul, S. F. et al. (1990) J. Mol. Biol. 215:403 410), which is available from several sources, including the NCBI, Bethesda, Md., at its website. The BLAST software suite includes various sequence analysis programs including “blastn,” that is used to align a known polynucleotide sequence with other polynucleotide sequences from a variety of databases. Also available is a tool called “BLAST 2 Sequences” that is used for direct pairwise comparison of two nucleotide sequences. “BLAST 2 Sequences” can be accessed and used interactively at the NCBI website. The “BLAST 2 Sequences” tool can be used for both blastn and blastp (discussed above).

[0068] Percent identity may be measured over the length of an entire defined polynucleotide sequence or may be measured over a shorter length, for example, over the length of a fragment taken from a larger, defined sequence, for instance, a fragment of at least 20, at least 30, at least 40, at least 50, at least 70, at least 100, or at least 200 contiguous nucleotides. Such lengths are exemplary only, and it is understood that any fragment length may be used to describe a length over which percentage identity may be measured.

[0069] A “full length” polynucleotide sequence is one containing at least a translation initiation codon (e.g., methionine) followed by an open reading frame and a translation termination codon. A “full length” polynucleotide sequence encodes a “full length” polypeptide sequence.

[0070] A “variant,” “mutant,” or “derivative” of a particular nucleic acid sequence may be defined as a nucleic acid sequence having at least 50% sequence identity to the particular nucleic acid sequence over a certain length of one of the nucleic acid sequences using blastn with the “BLAST 2 Sequences” tool available at the National Center for Biotechnology Information's website. (See Tatiana A. Tatusova, Thomas L. Madden (1999), “Blast 2 sequences—a new tool for comparing protein and nucleotide sequences”, FEMS Microbiol Lett. 174:247-250). In some embodiments a variant polynucleotide may show, for example, at least 60%, at least 70%, at least 80%, at least 90%, at least 91%, at least 92%, at least 93%, at least 94%, at least 95%, at least 96%, at least 97%, at least 98%, or at least 99% or greater sequence identity over a certain defined length relative to a reference polynucleotide.

[0071] As used herein, “upstream” refers to the relative position of a genetic sequence, either DNA or RNA. Upstream relates to the 5′ to 3′ direction relative to the start site of transcription, wherein upstream is usually closer to the 5′ end of a genetic sequence.

[0072] As used herein, “downstream” refers to the relative position of a genetic sequence, either DNA or RNA. Downstream relates to the 5′ to 3′ direction relative the start site of transcription, wherein downstream is usually closer to the 3′ end of a genetic sequence.

[0073] “Gene” includes a nucleic acid fragment that expresses a functional molecule such as, but not limited to, a specific protein, including regulatory sequences preceding (5′ noncoding sequences) and following (3′ non-coding sequences) the coding sequence. “Native gene” refers to a gene as found in its natural endogenous location with its own regulatory sequences.

[0074] The terms “knock-out”, “gene knock-out” and “genetic knock-out” are used interchangeably herein. A knock-out represents a DNA sequence of a cell that has been rendered partially or completely inoperative by targeting with a Cas protein; for example, a DNA sequence prior to knock-out could have encoded an amino acid sequence, or could have had a regulatory function (e.g., promoter).

[0075] The terms “knock-in”, “gene knock-in, “gene insertion” and “genetic knock-in” are used interchangeably herein. A knock-in represents the replacement or insertion of a DNA sequence at a specific DNA sequence in cell by targeting with a Cas protein (for example by homologous recombination (HR), wherein a suitable donor DNA polynucleotide is also used) examples of knock-ins are a specific insertion of a heterologous amino acid coding sequence in a coding region of a gene, or a specific insertion of a transcriptional regulatory element in a genetic locus.

[0076] By “domain” it is meant a contiguous stretch of nucleotides (that can be RNA, DNA, and/or RNA-DNA-combination sequence) or amino acids.

[0077] An “enhancer” is a DNA sequence that can stimulate promoter activity and may be an innate element of the promoter or a heterologous element inserted to enhance the level or tissue-specificity of a promoter. Promoters may be derived in their entirety from a native gene or be composed of different elements derived from different promoters found in nature, and/or comprise synthetic DNA segments. It is understood by those skilled in the art that different promoters may direct the expression of a gene in different tissues or cell types, or at different stages of development, or in response to different environmental conditions. It is further recognized that since in most cases the exact boundaries of regulatory sequences have not been completely defined, DNA fragments of some variation may have identical promoter activity.

### Nucleic Acid Constructs and Cell Compositions

[0078] The microbial community, or microbiome, residing in the human gastrointestinal tract (GI tract) comprise a relatively undiscovered area for understanding the development of GI tract functions, and better understanding of health disorders and diseases, and development of associated treatments and therapies. Herein, it should be noted that “microbial community”, “microbiome”, and “microbiota” are used interchangeably to refer to the bacterial populations, including the bacterial organisms and the genetic material within the bacteria residing in the human GI tract. The microbiota is now recognized as a human organ comprising its own functions, including but not limited to regulating gene expression for mucosal barrier fortification, angiogenesis, and intestinal maturation. The microbiota is also involved in normal digestion and impacts the energy harvest from the diet and energy storage in the host.

[0079] The diversity of the GI tract microbiome has been revealed to be represented by over 1500 bacterial species. From birth, the normal GI tract microbiome contributes to the development of GI tract function, influences the immune system, contributes to the regulation and maintenance of the intestinal barrier, and promotes tolerance of foods. It is now recognized that a symbiotic relationship exists between human host and the microbiota that is fundamental to human health. Disruption of the stability of the GI tract microbiota is associated with, or may even contribute to the pathogenesis of diseases. Unfavorable changes to the microbiota, often caused dysregulation of microbiome gene expression, is associated with several childhood and adult diseases, including but not limited to nosocomial infections, necrotizing enterocolitis (NEC), inflammatory bowel disease (IBD), obesity, autoimmune diseases, and allergies. Because of the interactions/relationships between the human hosts and GI tract microbiota impacting human health and disease, there is a need to develop constructs, compositions, and methods for (re)programming the GI tract microbiota.

[0080] The present disclosure provides constructs and cell compositions for reprogramming a GI microbiome.

[0081] In one aspect, disclosed herein is a construct comprising a plurality of nucleic acid sequences encoding a first group of one or more regulatory core domains, a second group of one or more regulatory core domains, one or more DNA binding domains, wherein the first group of the one or more regulatory core domains and the second group of the one or more regulatory core domains are each linked to one of the DNA binding domains, and one or more DNA operator elements, wherein the one or more DNA operator elements are each specifically recognized by one of the DNA binding domains.

[0082] In some embodiments, the first group comprises 1, 2, 3, 4, 5, 6, 7, 8, 9, 10, or more regulatory core domains. In some embodiments, the second group comprises 1, 2, 3, 4, 5, 6, 7, 8, 9, 10, or more regulatory core domains. In some embodiments, construct comprises 1, 2, 3, 4, 5, 6, 7, 8, 9, 10, or more DNA binding domains.

[0083] In some embodiments, the construct further comprises SEQ ID NO: 31, SEQ ID NO: 32, SEQ ID NO: 33, SEQ ID NO: 34, SEQ ID NO: 35, SEQ ID NO: 36, SEQ ID NO: 37, SEQ ID NO: 38, SEQ ID NO: 39, SEQ ID NO: 40, SEQ ID NO: 41, SEQ ID NO: 42, SEQ ID NO: 43, SEQ ID NO: 44, SEQ ID NO: 45, SEQ ID NO: 46, SEQ ID NO: 47, SEQ ID NO: 48, SEQ ID NO: 49, SEQ ID NO: 50, SEQ ID NO: 51, SEQ ID NO: 52, SEQ ID NO: 53, SEQ ID NO: 54, SEQ ID NO: 55, SEQ ID NO: 56, SEQ ID NO: 57, SEQ ID NO: 58, SEQ ID NO: 59, SEQ ID NO: 60, SEQ ID NO: 61, SEQ ID NO: 62, SEQ ID NO: 63, SEQ ID NO: 64, SEQ ID NO: 65, SEQ ID NO: 66, SEQ ID NO: 67, SEQ ID NO: 68, or variants thereof.

[0084] It should be understood that that term “variant” refers to the construct having at least 50% sequence identity to SEQ ID NO: 31, SEQ ID NO: 32, SEQ ID NO: 33, SEQ ID NO: 34, SEQ ID NO: 35, SEQ ID NO: 36, SEQ ID NO: 37, SEQ ID NO: 38, SEQ ID NO: 39, SEQ ID NO: 40, SEQ ID NO: 41, SEQ ID NO: 42, SEQ ID NO: 43, SEQ ID NO: 44, SEQ ID NO: 45, SEQ ID NO: 46, SEQ ID NO: 47, SEQ ID NO: 48, SEQ ID NO: 49, SEQ ID NO: 50, SEQ ID NO: 51, SEQ ID NO: 52, SEQ ID NO: 53, SEQ ID NO: 54, SEQ ID NO: 55, SEQ ID NO: 56, SEQ ID NO: 57, SEQ ID NO: 58, SEQ ID NO: 59, SEQ ID NO: 60, SEQ ID NO: 61, SEQ ID NO: 62, SEQ ID NO: 63, SEQ ID NO: 64, SEQ ID NO: 65, SEQ ID NO: 66, SEQ ID NO: 67, or SEQ ID NO: 68.

[0085] Thus, in some embodiments, the construct comprises at least 50% sequence identity to SEQ ID NO: 31, SEQ ID NO: 32, SEQ ID NO: 33, SEQ ID NO: 34, SEQ ID NO: 35, SEQ ID NO: 36, SEQ ID NO: 37, SEQ ID NO: 38, SEQ ID NO: 39, SEQ ID NO: 40, SEQ ID NO: 41, SEQ ID NO: 42, SEQ ID NO: 43, SEQ ID NO: 44, SEQ ID NO: 45, SEQ ID NO: 46, SEQ ID NO: 47, SEQ ID NO: 48, SEQ ID NO: 49, SEQ ID NO: 50, SEQ ID NO: 51, SEQ ID NO: 52, SEQ ID NO: 53, SEQ ID NO: 54, SEQ ID NO: 55, SEQ ID NO: 56, SEQ ID NO: 57, SEQ ID NO: 58, SEQ ID NO: 59, SEQ ID NO: 60, SEQ ID NO: 61, SEQ ID NO: 62, SEQ ID NO: 63, SEQ ID NO: 64, SEQ ID NO: 65, SEQ ID NO: 66, SEQ ID NO: 67, or SEQ ID NO: 68.

[0086] In some embodiments, the construct comprises at least 55% sequence identity to SEQ ID NO: 31, SEQ ID NO: 32, SEQ ID NO: 33, SEQ ID NO: 34, SEQ ID NO: 35, SEQ ID NO: 36, SEQ ID NO: 37, SEQ ID NO: 38, SEQ ID NO: 39, SEQ ID NO: 40, SEQ ID NO: 41, SEQ ID NO: 42, SEQ ID NO: 43, SEQ ID NO: 44, SEQ ID NO: 45, SEQ ID NO: 46, SEQ ID NO: 47, SEQ ID NO: 48, SEQ ID NO: 49, SEQ ID NO: 50, SEQ ID NO: 51, SEQ ID NO: 52, SEQ ID NO: 53, SEQ ID NO: 54, SEQ ID NO: 55, SEQ ID NO: 56, SEQ ID NO: 57, SEQ ID NO: 58, SEQ ID NO: 59, SEQ ID NO: 60, SEQ ID NO: 61, SEQ ID NO: 62, SEQ ID NO: 63, SEQ ID NO: 64, SEQ ID NO: 65, SEQ ID NO: 66, SEQ ID NO: 67, or SEQ ID NO: 68.

[0087] In some embodiments, the construct comprises at least 60% sequence identity to SEQ ID NO: 31, SEQ ID NO: 32, SEQ ID NO: 33, SEQ ID NO: 34, SEQ ID NO: 35, SEQ ID NO: 36, SEQ ID NO: 37, SEQ ID NO: 38, SEQ ID NO: 39, SEQ ID NO: 40, SEQ ID NO: 41, SEQ ID NO: 42, SEQ ID NO: 43, SEQ ID NO: 44, SEQ ID NO: 45, SEQ ID NO: 46, SEQ ID NO: 47, SEQ ID NO: 48, SEQ ID NO: 49, SEQ ID NO: 50, SEQ ID NO: 51, SEQ ID NO: 52, SEQ ID NO: 53, SEQ ID NO: 54, SEQ ID NO: 55, SEQ ID NO: 56, SEQ ID NO: 57, SEQ ID NO: 58, SEQ ID NO: 59, SEQ ID NO: 60, SEQ ID NO: 61, SEQ ID NO: 62, SEQ ID NO: 63, SEQ ID NO: 64, SEQ ID NO: 65, SEQ ID NO: 66, SEQ ID NO: 67, or SEQ ID NO: 68.

[0088] In some embodiments, the construct comprises at least 65% sequence identity to SEQ ID NO: 31, SEQ ID NO: 32, SEQ ID NO: 33, SEQ ID NO: 34, SEQ ID NO: 35, SEQ ID NO: 36, SEQ ID NO: 37, SEQ ID NO: 38, SEQ ID NO: 39, SEQ ID NO: 40, SEQ ID NO: 41, SEQ ID NO: 42, SEQ ID NO: 43, SEQ ID NO: 44, SEQ ID NO: 45, SEQ ID NO: 46, SEQ ID NO: 47, SEQ ID NO: 48, SEQ ID NO: 49, SEQ ID NO: 50, SEQ ID NO: 51, SEQ ID NO: 52, SEQ ID NO: 53, SEQ ID NO: 54, SEQ ID NO: 55, SEQ ID NO: 56, SEQ ID NO: 57, SEQ ID NO: 58, SEQ ID NO: 59, SEQ ID NO: 60, SEQ ID NO: 61, SEQ ID NO: 62, SEQ ID NO: 63, SEQ ID NO: 64, SEQ ID NO: 65, SEQ ID NO: 66, SEQ ID NO: 67, or SEQ ID NO: 68.

[0089] In some embodiments, the construct comprises at least 70% sequence identity to SEQ ID NO: 31, SEQ ID NO: 32, SEQ ID NO: 33, SEQ ID NO: 34, SEQ ID NO: 35, SEQ ID NO: 36, SEQ ID NO: 37, SEQ ID NO: 38, SEQ ID NO: 39, SEQ ID NO: 40, SEQ ID NO: 41, SEQ ID NO: 42, SEQ ID NO: 43, SEQ ID NO: 44, SEQ ID NO: 45, SEQ ID NO: 46, SEQ ID NO: 47, SEQ ID NO: 48, SEQ ID NO: 49, SEQ ID NO: 50, SEQ ID NO: 51, SEQ ID NO: 52, SEQ ID NO: 53, SEQ ID NO: 54, SEQ ID NO: 55, SEQ ID NO: 56, SEQ ID NO: 57, SEQ ID NO: 58, SEQ ID NO: 59, SEQ ID NO: 60, SEQ ID NO: 61, SEQ ID NO: 62, SEQ ID NO: 63, SEQ ID NO: 64, SEQ ID NO: 65, SEQ ID NO: 66, SEQ ID NO: 67, or SEQ ID NO: 68.

[0090] In some embodiments, the construct comprises at least 75% sequence identity to SEQ ID NO: 31, SEQ ID NO: 32, SEQ ID NO: 33, SEQ ID NO: 34, SEQ ID NO: 35, SEQ ID NO: 36, SEQ ID NO: 37, SEQ ID NO: 38, SEQ ID NO: 39, SEQ ID NO: 40, SEQ ID NO: 41, SEQ ID NO: 42, SEQ ID NO: 43, SEQ ID NO: 44, SEQ ID NO: 45, SEQ ID NO: 46, SEQ ID NO: 47, SEQ ID NO: 48, SEQ ID NO: 49, SEQ ID NO: 50, SEQ ID NO: 51, SEQ ID NO: 52, SEQ ID NO: 53, SEQ ID NO: 54, SEQ ID NO: 55, SEQ ID NO: 56, SEQ ID NO: 57, SEQ ID NO: 58, SEQ ID NO: 59, SEQ ID NO: 60, SEQ ID NO: 61, SEQ ID NO: 62, SEQ ID NO: 63, SEQ ID NO: 64, SEQ ID NO: 65, SEQ ID NO: 66, SEQ ID NO: 67, or SEQ ID NO: 68.

[0091] In some embodiments, the construct comprises at least 80% sequence identity to SEQ ID NO: 31, SEQ ID NO: 32, SEQ ID NO: 33, SEQ ID NO: 34, SEQ ID NO: 35, SEQ ID NO: 36, SEQ ID NO: 37, SEQ ID NO: 38, SEQ ID NO: 39, SEQ ID NO: 40, SEQ ID NO: 41, SEQ ID NO: 42, SEQ ID NO: 43, SEQ ID NO: 44, SEQ ID NO: 45, SEQ ID NO: 46, SEQ ID NO: 47, SEQ ID NO: 48, SEQ ID NO: 49, SEQ ID NO: 50, SEQ ID NO: 51, SEQ ID NO: 52, SEQ ID NO: 53, SEQ ID NO: 54, SEQ ID NO: 55, SEQ ID NO: 56, SEQ ID NO: 57, SEQ ID NO: 58, SEQ ID NO: 59, SEQ ID NO: 60, SEQ ID NO: 61, SEQ ID NO: 62, SEQ ID NO: 63, SEQ ID NO: 64, SEQ ID NO: 65, SEQ ID NO: 66, SEQ ID NO: 67, or SEQ ID NO: 68.

[0092] In some embodiments, the construct comprises at least 85% sequence identity to SEQ ID NO: 31, SEQ ID NO: 32, SEQ ID NO: 33, SEQ ID NO: 34, SEQ ID NO: 35, SEQ ID NO: 36, SEQ ID NO: 37, SEQ ID NO: 38, SEQ ID NO: 39, SEQ ID NO: 40, SEQ ID NO: 41, SEQ ID NO: 42, SEQ ID NO: 43, SEQ ID NO: 44, SEQ ID NO: 45, SEQ ID NO: 46, SEQ ID NO: 47, SEQ ID NO: 48, SEQ ID NO: 49, SEQ ID NO: 50, SEQ ID NO: 51, SEQ ID NO: 52, SEQ ID NO: 53, SEQ ID NO: 54, SEQ ID NO: 55, SEQ ID NO: 56, SEQ ID NO: 57, SEQ ID NO: 58, SEQ ID NO: 59, SEQ ID NO: 60, SEQ ID NO: 61, SEQ ID NO: 62, SEQ ID NO: 63, SEQ ID NO: 64, SEQ ID NO: 65, SEQ ID NO: 66, SEQ ID NO: 67, or SEQ ID NO: 68.

[0093] In some embodiments, the construct comprises at least 90% sequence identity to SEQ ID NO: 31, SEQ ID NO: 32, SEQ ID NO: 33, SEQ ID NO: 34, SEQ ID NO: 35, SEQ ID NO: 36, SEQ ID NO: 37, SEQ ID NO: 38, SEQ ID NO: 39, SEQ ID NO: 40, SEQ ID NO: 41, SEQ ID NO: 42, SEQ ID NO: 43, SEQ ID NO: 44, SEQ ID NO: 45, SEQ ID NO: 46, SEQ ID NO: 47, SEQ ID NO: 48, SEQ ID NO: 49, SEQ ID NO: 50, SEQ ID NO: 51, SEQ ID NO: 52, SEQ ID NO: 53, SEQ ID NO: 54, SEQ ID NO: 55, SEQ ID NO: 56, SEQ ID NO: 57, SEQ ID NO: 58, SEQ ID NO: 59, SEQ ID NO: 60, SEQ ID NO: 61, SEQ ID NO: 62, SEQ ID NO: 63, SEQ ID NO: 64, SEQ ID NO: 65, SEQ ID NO: 66, SEQ ID NO: 67, or SEQ ID NO: 68.

[0094] In some embodiments, the construct comprises at least 95% sequence identity to SEQ ID NO: 31, SEQ ID NO: 32, SEQ ID NO: 33, SEQ ID NO: 34, SEQ ID NO: 35, SEQ ID NO: 36, SEQ ID NO: 37, SEQ ID NO: 38, SEQ ID NO: 39, SEQ ID NO: 40, SEQ ID NO: 41, SEQ ID NO: 42, SEQ ID NO: 43, SEQ ID NO: 44, SEQ ID NO: 45, SEQ ID NO: 46, SEQ ID NO: 47, SEQ ID NO: 48, SEQ ID NO: 49, SEQ ID NO: 50, SEQ ID NO: 51, SEQ ID NO: 52, SEQ ID NO: 53, SEQ ID NO: 54, SEQ ID NO: 55, SEQ ID NO: 56, SEQ ID NO: 57, SEQ ID NO: 58, SEQ ID NO: 59, SEQ ID NO: 60, SEQ ID NO: 61, SEQ ID NO: 62, SEQ ID NO: 63, SEQ ID NO: 64, SEQ ID NO: 65, SEQ ID NO: 66, SEQ ID NO: 67, or SEQ ID NO: 68.

[0095] In some embodiments, the construct comprises at least 99% sequence identity to SEQ ID NO: 31, SEQ ID NO: 32, SEQ ID NO: 33, SEQ ID NO: 34, SEQ ID NO: 35, SEQ ID NO: 36, SEQ ID NO: 37, SEQ ID NO: 38, SEQ ID NO: 39, SEQ ID NO: 40, SEQ ID NO: 41, SEQ ID NO: 42, SEQ ID NO: 43, SEQ ID NO: 44, SEQ ID NO: 45, SEQ ID NO: 46, SEQ ID NO: 47, SEQ ID NO: 48, SEQ ID NO: 49, SEQ ID NO: 50, SEQ ID NO: 51, SEQ ID NO: 52, SEQ ID NO: 53, SEQ ID NO: 54, SEQ ID NO: 55, SEQ ID NO: 56, SEQ ID NO: 57, SEQ ID NO: 58, SEQ ID NO: 59, SEQ ID NO: 60, SEQ ID NO: 61, SEQ ID NO: 62, SEQ ID NO: 63, SEQ ID NO: 64, SEQ ID NO: 65, SEQ ID NO: 66, SEQ ID NO: 67, or SEQ ID NO: 68.

[0096] In some embodiments, the construct comprises SEQ ID NO: 31, SEQ ID NO: 32, SEQ ID NO: 33, SEQ ID NO: 34, SEQ ID NO: 35, SEQ ID NO: 36, SEQ ID NO: 37, SEQ ID NO: 38, SEQ ID NO: 39, SEQ ID NO: 40, SEQ ID NO: 41, SEQ ID NO: 42, SEQ ID NO: 43, SEQ ID NO: 44, SEQ ID NO: 45, SEQ ID NO: 46, SEQ ID NO: 47, SEQ ID NO: 48, SEQ ID NO: 49, SEQ ID NO: 50, SEQ ID NO: 51, SEQ ID NO: 52, SEQ ID NO: 53, SEQ ID NO: 54, SEQ ID NO: 55, SEQ ID NO: 56, SEQ ID NO: 57, SEQ ID NO: 58, SEQ ID NO: 59, SEQ ID NO: 60, SEQ ID NO: 61, SEQ ID NO: 62, SEQ ID NO: 63, SEQ ID NO: 64, SEQ ID NO: 65, SEQ ID NO: 66, SEQ ID NO: 67, or SEQ ID NO: 68.

[0097] Ins some embodiments, the plurality of nucleic acid sequences comprises any combination of SEQ ID NO: 1, SEQ ID NO: 2, SEQ ID NO: 3, SEQ ID NO: 4, SEQ ID NO: 5, SEQ ID NO: 7, SEQ ID NO: 8, SEQ ID NO: 9, SEQ ID NO: 10, SEQ ID NO: 11, SEQ ID NO: 12, SEQ ID NO: 13, SEQ ID NO: 14, SEQ ID NO: 15, SEQ ID NO: 20, SEQ ID NO: 21, SEQ ID NO: 22, SEQ ID NO: 23, SEQ ID NO: 24, SEQ ID NO: 25, SEQ ID NO: 26, SEQ ID NO: 27, SEQ ID NO: 28, or variants thereof.

[0098] In some embodiments, the first group of one or more regulatory core domains comprises at least one repressor or at least one anti-repressor, or a combination thereof. In some embodiments, the first group of one or more regulatory core domains comprises one, two, three, four, five or more repressors or one, two, three, four, five or more anti-repressor, or a combination thereof. In some embodiments, the first group of one or more regulatory core domains comprises at least two repressor or at least two anti-repressor, or a combination thereof.

[0099] In some embodiments, the second group of one or more regulatory core domains comprise at least one repressors, at least one anti-repressors, or a combination thereof. In some embodiments, the second group of one or more regulatory core domains comprises one, two, three, four, five or more repressors or one, two, three, four, five or more anti-repressor, or a combination thereof. In some embodiments, the second group of one or more regulatory core domains comprises at least two repressor or at least two anti-repressor, or a combination thereof.

[0100] In some embodiments, the first group of one or more regulatory core domains are specifically recognized by a first agent. In some embodiments, the first agent is isopropyl-β-D-1-thiogalactopyranoside.

[0101] In some embodiments, the second group of one or more regulatory core domains are specifically recognized by a second agent. In some embodiments, the second agent is D-ribose.

[0102] In some embodiments, the first and second group of the one or more regulatory core domains are linked to a same DNA binding domain. In some embodiments, the first and second group of the one or more regulatory core domains are linked to different DNA binding domains.

[0103] In some embodiments, the construct comprises a plurality of nucleic acid sequences encoding a first group of two regulatory core domains, a second group of two regulatory core domains, three DNA binding domains, wherein the first group of the regulatory core domains and second group of the regulatory core domains are each linked to one of the three DNA binding domains, and three DNA operator elements that are each specifically recognized by one of the three DNA binding domains.

[0104] In some embodiments, the construct further comprises a nucleic acid sequence encoding a reporter including, but not limited to green fluorescent protein (GFP), yellow fluorescent protein (YFP), blue fluorescent protein (BFP), cyane fluorescent protein (CFP), monomeric red fluorescent protein (mRFP), Discosoma svriata (DsRed), mCherry, mOrange, tdTomato, mSTrawberry, mPlum, photoactivatable GFP (PA-GFP), Venus, Kaede, monomeric kusabira orange (mKO), Dronpa, enhanced CFP (ECFP), Emerald, Cyan fluorescent protein for energy transfer (CyPet), super CFP (SCFP), Cerulean, photoswitchable CFP (PS-CFP2), photoactivatable RFP1 (PA-RFP1), photoactivatable mCherry (PA-mCherry), monomeric teal fluorescent protein (mTFP1), Eos fluorescent protein (EosFP), Dendra, TagBFP, TagRFP, enhanced YFP (EYFP), luciferase, Topaz, Citrine, yellow fluorescent protein for energy transfer (YPet), super YFP (SYFP), enhanced GFP (EGFP), Superfolder GFP, T-Sapphire, Fucci, mKO2, mOrange2, mApple, Sirius, Azurite, EBFP, and/or EBFP2.

[0105] In some embodiments, the construct is coupled to a nucleic acid sequence encoding components of a CRISPR gene editing system.

[0106] Clustered regularly interspaced short palindromic repeats (CRISPR) and CRISPR-associated system (CRISPR/-Cas9) is a popular tool for genome editing. However, use of CRISPR-Cas9 as a programmable genome editing tool is hindered by off-target DNA cleavage (Cong et al., 2013; Doudna, 2020; Fu et al., 2013; Jinek et al., 2013), and the underlying mechanisms by which Cas9 recognizes mismatches are poorly understood (Kim et al., 2019; Liu et al., 2020; Slaymaker and Gaudelli, 2021). Although Cas9 variants with greater discrimination against mismatches have been designed (Chen et al., 2017; Kleinstiver et al., 2016; Slaymaker et al., 2016), these suffer from significantly reduced on-target DNA cleavage rates (Kim et al., 2020; Liu et al., 2020).

[0107] In some embodiments, the construct further comprises a nucleic acid sequence encoding a dead Cas9 endonuclease (dCas9) and a single guide RNA (sgRNA).

[0108] The dCas9, also known as an endonuclease deficient Cas, is a variant form of the parent Cas9, whose endonuclease activity is removed by mutating the endonuclease domains. It should be understood however that dCas9 may still possess binding activity to guide RNA and targeted DNA strands.

[0109] Disclosed herein is an isolated Cas9 variant or a fragment. By “variant” or “fragment” is meant a functional fragment or functional variant of a native Cas protein, or a protein that shares at least 30%, between 30% and 35%, at least 35%, between 35% and 40%, at least 40%, between 40% and 45%, at least 45%, between 45% and 50%, at least 50%, 50%, between 50% and 55%, at least 55%, between 55% and 60%, at least 60%, between 60% and 65%, at least 65%, between 65% and 70%, at least 70%, between 70% and 75%, at least 75%, between 75% and 80%, at least 80%, between 80% and 85%, at least 85%, between 85% and 90%, at least 90%, between 90% and 95%, at least 95%, between 95% and 96%, at least 96%, between 96% and 97%, at least 97%, between 97% and 98%, at least 98%, between 98% and 99%, or at least 99% sequence identity to a parent Cas9 polypeptide. It is noted that “parent” and “native” are referred to alternatively herein, and have the same meaning, which is the naturally occurring Cas9 on which the variant or fragment thereof is based.

[0110] The terms “single guide RNA” and “sgRNA” are used interchangeably herein and relate to a synthetic fusion of two RNA molecules, a crRNA (CRISPR RNA) comprising a variable targeting domain (linked to a tracr mate sequence that hybridizes to a tracrRNA), fused to a tracrRNA (trans-activating CRISPR RNA). The single guide RNA can comprise a crRNA or crRNA fragment and a tracrRNA or tracrRNA fragment of the CRISPR/Cas system that can form a complex with a Cas endonuclease, wherein said guide RNA/Cas endonuclease complex can direct the Cas endonuclease to a DNA target site, enabling the Cas endonuclease to recognize, optionally bind to, and optionally nick or cleave (introduce a single or double-strand break) the DNA target site.

[0111] In some embodiments, the nucleic acid sequence encodes any combination of SEQ ID NO: 6, SEQ ID NO: 16, SEQ ID NO: 17, SEQ ID NO: 18, SEQ ID NO: 19, or variants thereof.

[0112] In some embodiments, the construct further comprises at least 50% sequence identity to SEQ ID NO: 69, SEQ ID NO: 70, SEQ ID NO: 71, SEQ ID NO: 72, SEQ ID NO: 73, SEQ ID NO: 74, SEQ ID NO: 75, SEQ ID NO: 76, SEQ ID NO: 77, SEQ ID NO: 78, SEQ ID NO: 79, SEQ ID NO: 80, or SEQ ID NO: 81.

[0113] In some embodiments, the construct further comprises at least 55% sequence identity to SEQ ID NO: 69, SEQ ID NO: 70, SEQ ID NO: 71, SEQ ID NO: 72, SEQ ID NO: 73, SEQ ID NO: 74, SEQ ID NO: 75, SEQ ID NO: 76, SEQ ID NO: 77, SEQ ID NO: 78, SEQ ID NO: 79, SEQ ID NO: 80, or SEQ ID NO: 81.

[0114] In some embodiments, the construct further comprises at least 60% sequence identity to SEQ ID NO: 69, SEQ ID NO: 70, SEQ ID NO: 71, SEQ ID NO: 72, SEQ ID NO: 73, SEQ ID NO: 74, SEQ ID NO: 75, SEQ ID NO: 76, SEQ ID NO: 77, SEQ ID NO: 78, SEQ ID NO: 79, SEQ ID NO: 80, or SEQ ID NO: 81.

[0115] In some embodiments, the construct further comprises at least 65% sequence identity to SEQ ID NO: 69, SEQ ID NO: 70, SEQ ID NO: 71, SEQ ID NO: 72, SEQ ID NO: 73, SEQ ID NO: 74, SEQ ID NO: 75, SEQ ID NO: 76, SEQ ID NO: 77, SEQ ID NO: 78, SEQ ID NO: 79, SEQ ID NO: 80, or SEQ ID NO: 81.

[0116] In some embodiments, the construct further comprises at least 70% sequence identity to SEQ ID NO: 69, SEQ ID NO: 70, SEQ ID NO: 71, SEQ ID NO: 72, SEQ ID NO: 73, SEQ ID NO: 74, SEQ ID NO: 75, SEQ ID NO: 76, SEQ ID NO: 77, SEQ ID NO: 78, SEQ ID NO: 79, SEQ ID NO: 80, or SEQ ID NO: 81.

[0117] In some embodiments, the construct further comprises at least 75% sequence identity to SEQ ID NO: 69, SEQ ID NO: 70, SEQ ID NO: 71, SEQ ID NO: 72, SEQ ID NO: 73, SEQ ID NO: 74, SEQ ID NO: 75, SEQ ID NO: 76, SEQ ID NO: 77, SEQ ID NO: 78, SEQ ID NO: 79, SEQ ID NO: 80, or SEQ ID NO: 81.

[0118] In some embodiments, the construct further comprises at least 80% sequence identity to SEQ ID NO: 69, SEQ ID NO: 70, SEQ ID NO: 71, SEQ ID NO: 72, SEQ ID NO: 73, SEQ ID NO: 74, SEQ ID NO: 75, SEQ ID NO: 76, SEQ ID NO: 77, SEQ ID NO: 78, SEQ ID NO: 79, SEQ ID NO: 80, or SEQ ID NO: 81.

[0119] In some embodiments, the construct further comprises at least 85% sequence identity to SEQ ID NO: 69, SEQ ID NO: 70, SEQ ID NO: 71, SEQ ID NO: 72, SEQ ID NO: 73, SEQ ID NO: 74, SEQ ID NO: 75, SEQ ID NO: 76, SEQ ID NO: 77, SEQ ID NO: 78, SEQ ID NO: 79, SEQ ID NO: 80, or SEQ ID NO: 81.

[0120] In some embodiments, the construct further comprises at least 90% sequence identity to SEQ ID NO: 69, SEQ ID NO: 70, SEQ ID NO: 71, SEQ ID NO: 72, SEQ ID NO: 73, SEQ ID NO: 74, SEQ ID NO: 75, SEQ ID NO: 76, SEQ ID NO: 77, SEQ ID NO: 78, SEQ ID NO: 79, SEQ ID NO: 80, or SEQ ID NO: 81.

[0121] In some embodiments, the construct further comprises at least 95% sequence identity to SEQ ID NO: 69, SEQ ID NO: 70, SEQ ID NO: 71, SEQ ID NO: 72, SEQ ID NO: 73, SEQ ID NO: 74, SEQ ID NO: 75, SEQ ID NO: 76, SEQ ID NO: 77, SEQ ID NO: 78, SEQ ID NO: 79, SEQ ID NO: 80, or SEQ ID NO: 81.

[0122] In some embodiments, the construct further comprises at least 99% sequence identity to SEQ ID NO: 69, SEQ ID NO: 70, SEQ ID NO: 71, SEQ ID NO: 72, SEQ ID NO: 73, SEQ ID NO: 74, SEQ ID NO: 75, SEQ ID NO: 76, SEQ ID NO: 77, SEQ ID NO: 78, SEQ ID NO: 79, SEQ ID NO: 80, or SEQ ID NO: 81.

[0123] In some embodiments, the construct further comprises SEQ ID NO: 69, SEQ ID NO: 70, SEQ ID NO: 71, SEQ ID NO: 72, SEQ ID NO: 73, SEQ ID NO: 74, SEQ ID NO: 75, SEQ ID NO: 76, SEQ ID NO: 77, SEQ ID NO: 78, SEQ ID NO: 79, SEQ ID NO: 80, SEQ ID NO: 81, or variants thereof.

[0124] In one aspect, disclosed herein is a cell comprising a construct comprising a plurality of nucleic acid sequences encoding a first group of one or more regulatory core domains, a second group of one or more regulatory core domains, one or more DNA binding domains, wherein the first group of the one or more regulatory core domains and the second group of the one or more regulatory core domains are each linked to one of the DNA binding domains, and one or more DNA operator elements, wherein the one or more DNA operator elements are each specifically recognized by one of the DNA binding domains.

[0125] In some embodiments, the cell comprises the construct of any preceding aspect.

[0126] It should be understood that the construct can be introduced and/or integrated into the cell by techniques commonly known in the art including, but not limited to the method of transformation. “Transformation” of a cellular organism with DNA means introducing DNA into an organism so that at least a portion of the DNA is replicable, either as an extrachromosomal element or by chromosomal integration. The term “transformed” refers to a cell in which DNA was introduced. The cell is termed “host cell” and it may be either prokaryotic or eukaryotic. Typical prokaryotic host cells include various strains of E. coli. Typical eukaryotic host cells are mammalian, such as gastrointestinal cells of human origin. The introduced DNA sequence may be from the same species as the host cell or a different species from the host cell, or it may be a hybrid DNA sequence, containing some foreign and some homologous DNA.

[0127] In some embodiments, the cell is a bacterial cell. In some embodiments, the bacterial cell is a bacterium of gastrointestinal tract microbiota. In some embodiments, the bacterial cell is a species of Bacteroides genus selected from B. thetaiotaomicron (Bt), B. fragilis (Bf), B. vulgatus (Bv), B. ovatus (Bo), or B. uniformis (Bu).

### Methods

[0128] The present disclosure also provides methods of using nucleic acid constructs and/or cell compositions to modify and/or monitor a GI microbiome.

[0129] In one aspect, disclosed herein is a method of modifying a gastrointestinal tract microbiome in a subject, comprising administering to the subject an effective amount of a cell comprising a construct comprising a plurality of nucleic acid sequences encoding a first group of one or more regulatory core domains, a second group of one or more regulatory core domains, one or more DNA binding domains, wherein the first group of the one or more regulatory core domains and the second group of the one or more regulatory core domains are each linked to one of the DNA binding domains, and one or more DNA operator elements, wherein the one or more DNA operator elements are each specifically recognized by one of the DNA binding domains.

[0130] In some embodiments, the method of modifying a gastrointestinal tract microbiome in a subject, comprising administering to the subject an effective amount of the cell of any preceding aspect, wherein the cell comprises the construct of any preceding aspect.

[0131] As used herein, “modifying a gastrointestinal tract microbiome” refers to transcriptionally increasing or decreasing functions, cell numbers, or combinations thereof in a host organism, such as humans, to promote or revert the host GI tract to a normal functioning state. The method of modifying a GI tract microbiome” also refers to transcriptionally increasing or decreasing functions, cell numbers, gene expression, or combinations thereof in a host organism to facilitate the understanding of disease pathogeneses associated with the GI tract and further understanding bacterial populations within the GI tract microbiome.

[0132] In one aspect, disclosed herein is a method of monitoring a gastrointestinal tract microbiome in a subject, comprising administering to the subject an effective amount of a cell comprising a construct comprising a plurality of nucleic acid sequences encoding a first group of one or more regulatory core domains, a second group of one or more regulatory core domains, one or more DNA binding domains, wherein the first group of the one or more regulatory core domains and the second group of the one or more regulatory core domains are each linked to one of the DNA binding domains, and one or more DNA operator elements, wherein the one or more DNA operator elements are each specifically recognized by one of the DNA binding domains.

[0133] In some embodiments, the method of monitoring a gastrointestinal tract microbiome in a subject, comprising administering to the subject an effective amount of the cell of any preceding aspect, wherein the cell comprises the construct of any preceding aspect.

[0134] As used herein, “monitoring a gastrointestinal tract microbiome” refers to the processes of observing and/or routinely checking the increases or decreases in functions, cell numbers, or combinations thereof caused by transcriptionally (re)programming a host microbiome. It should be understood that the process of monitoring can be performed as often or as sparingly necessary to observe a desired effect. In some embodiments, the host can be monitored every day, every 2 days, every 3 days, every 4 days, every 5 days, every 6 days, every 7 days, or more. In some embodiments, the host can be monitored every week, every 2 weeks, every 3 weeks, every 4 weeks, or more. In some embodiments, the host can be monitored every month, every 2 months, every 3 months, every 4 months, every 5 months, every 6 months, every 7 months, every 8 months, every 9 months, every 10 months, every 11 months, every 12 months, or more. In some embodiments, the host can be monitored every year, every 2 years, every 3 years, every 4 years, every 5 years, or more.

[0135] In some embodiments, the host can be monitored 1, 2, 3, 4, 5, 6, 7, 8, 9, 10, 11, 12, 13, 14, 15, 16, 17, 18, 19, 20, 21, 22, 23, 24, 25, 26, 27, 28, 29, 30, 31, 32, 33, 34, 35, 36, 37, 38, 39, 40, 41, 42, 43, 44, 45, 46, 47, 48, 49, 50, 51, 52, 53, 54, 55, 56, 57, 58, 59, 60, 61, 62, 63, 64, 65, 66, 67, 68, 69, 70, 71, 72, 73, 74, 75, 76, 77, 78, 79, 80, 81, 82, 83, 84, 85, 86, 87, 88, 89, 90, 91, 92, 93, 94, 95, 96, 97, 98, 99, 100, or more times.

[0136] In one aspect, disclosed herein is a method of treating or preventing a disease or disorder in a subject in need thereof, the method comprising administering to the subject an effective amount of a cell comprising a construct comprising a plurality of nucleic acid sequences encoding a first group of one or more regulatory core domains, a second group of one or more regulatory core domains, one or more DNA binding domains, wherein the first group of the one or more regulatory core domains and the second group of the one or more regulatory core domains are each linked to one of the DNA binding domains, and one or more DNA operator elements, wherein the one or more DNA operator elements are each specifically recognized by one of the DNA binding domains, and wherein the construct transcriptionally (re)programs a bacterial population within the subject's GI tract to improve the host's health.

[0137] In one aspect, disclosed herein is a method of treating or preventing a disease or disorder in a subject in need thereof, the method comprising administering to the subject an effective amount of the cell comprising the construct of any preceding aspect, wherein the construct transcriptionally (re)programs a bacterial population within the subject's GI tract to improve the host's health.

[0138] In some embodiments, the method (re)programs the bacterial population into a therapeutic bacteria. In some embodiments, the bacterial population comprises a Bacteroides species including, but not limited to B. thetaiotaomicron (Bt), B. fragilis (Bf), B. vulgatus (Bv), B. ovatus (Bo), or B. uniformis (Bu).

[0139] In some embodiments, the disease or disorder includes, but are not limited to a cancer, a gastrointestinal disease, a congenital disease or disorder, an infectious disease, or combinations thereof.

[0140] In some embodiments, the cancer includes, but is not limited to acoustic neuroma, adenocarcinoma, adrenal gland cancer, anal cancer, angiosarcoma (e.g., lymphangiosarcoma, lymphangioendotheliosarcoma, hemangiosarcoma), appendix cancer, benign monoclonal gammopathy, biliary cancer (e.g., cholangiocarcinoma), bladder cancer, breast cancer (e.g., adenocarcinoma of the breast, papillary carcinoma of the breast, mammary cancer, medullary carcinoma of the breast), bronchus cancer, carcinoid tumor, cervical cancer (e.g., cervical adenocarcinoma), choriocarcinoma, chordoma, craniopharyngioma, colorectal cancer (e.g., colon cancer, rectal cancer, colorectal adenocarcinoma), epithelial carcinoma, ependymoma, endotheliosarcoma (e.g., Kaposi's sarcoma, multiple idiopathic hemorrhagic sarcoma), endometrial cancer (e.g., uterine cancer, uterine sarcoma), esophageal cancer (e.g., adenocarcinoma of the esophagus, Barrett's adenocarcinoma), Ewing's sarcoma, familiar hypereosinophilia, gall bladder cancer, gastric cancer (e.g., stomach adenocarcinoma), gastrointestinal stromal tumor (GIST), oral cancer (e.g., oral squamous cell carcinoma (OSCC), throat cancer (e.g., laryngeal cancer, pharyngeal cancer, nasopharyngeal cancer, oropharyngeal cancer)), a one or more leukemias and/or lymphomas known in the art, multiple myeloma (MM)), heavy chain disease (e.g., alpha chain disease, gamma chain disease, mu chain disease), hemangioblastoma, inflammatory myofibroblastic tumors, immunocytic amyloidosis, kidney cancer (e.g., nephroblastoma a.k.a. Wilms' tumor, renal cell carcinoma), liver cancer (e.g., hepatocellular cancer (HCC), malignant hepatoma), lung cancer (e.g., bronchogenic carcinoma, small cell lung cancer (SCLC), non-small cell lung cancer (NSCLC), adenocarcinoma of the lung), leiomyosarcoma (LMS), mastocytosis (e.g., systemic mastocytosis), myelodysplastic syndrome (MDS), mesothelioma, myeloproliferative disorder (MPD) (e.g., polycythemia Vera (PV), essential thrombocytosis (ET), agnogenic myeloid metaplasia (AMM) a.k.a. myelofibrosis (MF), chronic idiopathic myelofibrosis, osteosarcoma, ovarian cancer (e.g., cystadenocarcinoma, ovarian embryonal carcinoma, ovarian adenocarcinoma), papillary adenocarcinoma, pancreatic cancer (e.g., pancreatic adenocarcinoma, intraductal papillary mucinous neoplasm (IPMN), Islet cell tumors), penile cancer (e.g., Paget's disease of the penis and scrotum), pinealoma, prostate cancer (e.g., prostate adenocarcinoma), rectal cancer, rhabdomyosarcoma, salivary gland cancer, skin cancer (e.g., squamous cell carcinoma (SCC), keratoacanthoma (KA), melanoma, basal cell carcinoma (BCC)), small bowel cancer (e.g., appendix cancer), sebaceous gland carcinoma, sweat gland carcinoma, synovioma, testicular cancer (e.g., seminoma, testicular embryonal carcinoma), thyroid cancer (e.g., papillary carcinoma of the thyroid, papillary thyroid carcinoma (PTC), medullary thyroid cancer), urethral cancer, vaginal cancer and vulvar cancer (e.g., Paget's disease of the vulva).

[0141] In some embodiments, the gastrointestinal disease includes, but is not limited to heartburn, irritable bowel syndrome, lactose intolerance, gallstones, cholecystitis, cholangitis, anal fissure, hemorrhoids, proctitis, colon polyps, infective colitis, ulcerative colitis, ischemic colitis, Crohn's disease, radiation colitis, celiac disease, diarrhea (chronic or acute), constipation (chronic or acute), diverticulosis, diverticulitis, acid reflux (gastroesophageal reflux (GER) or gastroesophageal reflux disease (GERD)), Hirschsprung disease, abdominal adhesions, achalasia, acute hepatic porphyria (AHP), anal fistulas, bowel incontinence, centrally mediated abdominal pain syndrome (CAPS), clostridioides difficile infection, cyclic vomiting syndrome (CVS), dyspepsia, eosinophilic gastroenteritis, globus, inflammatory bowel disease, malabsorption, scleroderma, volvulus, and other gastrointestinal diseases.

[0142] In some embodiments, the congenital disease or disorder includes, but is not limited to amniotic band syndrome, Angelman syndrome, Barth syndrome, chromosomal abnormalities (including, but not limited to abnormalities to chromosome 9, 10, 16, 18, 20, 21, 22, X chromosome, and Y chromosome), congenital adrenal hyperplasia, congenital hyperinsulinism, congenital sucrase-isomaltase deficiency (CSID), cystic fibrosis, De Lange syndrome, fetal alcohol syndrome, first arch syndrome, gestational diabetes, Haemophilia, heterochromia, Jacobsen syndrome, Katz syndrome, Klinefelter syndrome, Kabuki syndrome, Kyphosis, Larsen syndrome, Laurence-Moon syndrome, macrocephaly, Marfan syndrome, microcephaly, Nager's syndrome, neonatal jaundice, neurofibromatosis, Noonan syndrome, Pallister-Killian syndrome, Pierre Robin syndrome, Poland syndrome, Prader-Willi syndrome, Rett syndrome, sickle cell disease, Smith-Lemli-Optiz syndrome, spina bifida, congenital syphilis, teratoma, Treacher Collins syndrome, Turner syndrome, Umbilical hernia, Usher syndrome, Waardenburg syndrome, Werner syndrome, Wolf-Hirschhorn syndrome, Wolff-Parkinson-White syndrome, and other congenital diseases or disorders.

[0143] In some embodiments, the infectious disease includes, but is not limited to common cold, influenza (including, but not limited to human, bovine, avian, porcine, and simian strains of influenza), measles, acquired immune deficiency syndrome/human immunodeficiency virus (AIDS/HIV), anthrax, botulism, cholera, campylobacter infections, chickenpox, chlamydia infections, cryptosporidosis, dengue fever, diphtheria, hemorrhagic fevers, Escherichia coli (E. coli) infections, ehrlichiosis, gonorrhea, hand-foot-mouth disease, hepatitis A, hepatitis B, hepatitis C, legionellosis, leprosy, leptospirosis, listeriosis, malaria, meningitis, meningococcal disease, mumps, pertussis, polio, pneumococcal disease, paralytic shellfish poisoning, rabies, rocky mountain spotted fever, rubella, salmonella, shigellosis, small pox, syphilis, tetanus, trichinosis (trichinellosis), tuberculosis (TB), typhoid fever, typhus, west nile virus, yellow fever, yersiniosis, and zika.

[0144] In some embodiments, the cell of any preceding aspect or the construct of any preceding aspect is administered in combination with a therapeutic agent. In some embodiments, the therapeutic agent includes, but is not limited to an antibiotic, a probiotic, an anti-inflammatory compound, a vitamin, a mineral, or combinations thereof.

[0145] In some embodiments, the antibiotic includes, but is not limited to penicillins (including, but not limited to amoxicillin, clavulanate and amoxicillin, ampicillin, dicloxacillin, oxacillin, and penicillin V potassium), tetracyclines (including, but not limited to demeclocycline, doxycycline, eravacycline, minocycline, omadacycline, sarecycline, and tetracycline), cephalosporins (cefaclor, cefadroxil, cefdinir, cephalexin, cefprozil, cefepime, cefiderocol, cefotaxime, cefotetan, ceftaroline, cefazidme, ceftriaxone, and cefuroxime), quinolones (also referred to as fluoroquinolones include, but are not limited to ciprofloxacin, delafloxacin, levofloxacin, moxifloxacin, and gemifloxacin), lincomycins (including clindamycin and lincomycin), macrolides (including, but not limited to azithromycin, clarithromycin, erythromycin, and fidaxomicin (ketolide)), sulfonamides (including sulfamethoxazole and trimethoprim, and sulfasalazine), glycopeptides (including, but not limited to dalbavancin, oritavancin, telavancin, and vancomycin), aminoglycosides (including, but not limited to gentamicin, tobramycin, and amikacin), carbapenems (including, but not limited to imipenem and cilastatin, meropenem, and ertapenem), and topical antibiotics (including, but not limited to neomycin, bacitracin, polymyxin B, and praxomine) used alone or in combination.

[0146] In some embodiments, the probiotic comprises a food or supplement comprising a beneficial bacterial species including, but not limited to Bifidobacteria animalis, Bifidobacteria breve, Bifidobacteria bifidum, Bifidobacteria lactis, Bifidobacteria longum, Lactobcillus acidophilus, Lactobacillus reuteri, Lacticaseibacillus rhamnosus, Lacticaseibacillus casei, Lactiplantibacillus plantarum, Ligilactobacillus salivarius, Limosilactobacillus fermentum, Lactobacillus paracasei, Lactobacillus gasseri, Lactobacillus acidophilus, Saccharomyces boulardii, Limosilactobacillus reuteri, Bacillus coagulans, or Streptococcus thermophilus alone or in combination.

[0147] In some embodiments, the anti-inflammatory compound includes, but is not limited to a non-steroidal anti-inflammatory compound including, but is not limited to aspirin, ibuprofen, ketoprofen, naproxen, steroids, glucocorticoids (including, but not limited to betamethasone, budesonide, dexamethasone, hydrocortisone, hydrocortisone acetate, methylprednisolone, prednisolone, prednisone, and triamcinolone), methotrexate, sulfasalazine, lefunomide, anti-Tumor Necrosis Factor (TNF) medications, cyclophosphamide, and mycophenolate used alone or in combination.

[0148] In some embodiments, the vitamin or mineral includes, but are not limited to vitamin D, magnesium, vitamin K, vitamin A, riboflavin, vitamin B12, thiamine, zinc, vitamin B6, biotin, vitamin C, folic acid, vitamin B3, calcium, iron, or derivatives thereof, given alone or in combination.

[0149] In some embodiments, the cell of any preceding aspect or the construct of any preceding aspect is administered in combination with a life-style change including, but not limited to dietary changes, exercise, physical therapy, or combinations thereof.

[0150] In one aspect, disclosed herein is a nucleic acid construct or cell of any preceding aspect and a pharmaceutically acceptable carrier selected from an excipient, a diluent, a salt, a buffer, a stabilizer, a lipid, an emulsion, and a nanoparticle. One or more active agents (e.g. the nucleic acid construct) can be administered in the “native” form, if desired in the form of salts, esters, amides, prodrugs, a derivative that is pharmacologically suitable, or within a transformed cell. Salts, esters, amides, prodrugs, and other derivatives of the active agents can be prepared using standards procedures known to those skilled in the art of synthetic organic chemistry and described, for example, by March (1992) Advanced Organic Chemistry; Reactions, Mechanisms, and Structure, 4^{th} Ed. N.Y. Wiley-Interscience.

[0151] The cell comprising the construct or the native construct may be administered in such amounts, time, and route deemed necessary in order to achieve the desired result. The exact amount of the cell comprising the construct or the native construct will vary from subject to subject, depending on the species, age, and general condition of the subject, the severity of the disease or disorder, the particular composition, its mode of administration, its mode of activity, and the like. The cell comprising the construct or the native construct is preferably formulated in dosage unit form for ease of administration and uniformity of dosage. It will be understood, however, that the total daily usage of the cell comprising the construct or the native construct will be decided by the attending physician within the scope of sound medical judgment. The specific therapeutically effective dose level for any particular subject will depend upon a variety of factors including the disease or disorder being treated and the severity of the disease or disorder; the activity of the cell comprising the construct or the native construct employed; the specific cell comprising the construct or the native construct employed; the age, body weight, general health, sex and diet of the patient; the time of administration, route of administration, and rate of excretion of the specific cell comprising the construct or the native construct employed; the duration of the treatment; drugs used in combination or coincidental with the specific cell comprising the construct or the native construct employed; and like factors well known in the medical arts.

[0152] The cell comprising the construct or the native construct may be administered by any route deemed appropriate to achieved the desired effect. In some embodiments, the cell comprising the construct or the native construct is administered via a variety of routes, including oral, intravenous, intramuscular, intra-arterial, intramedullary, intrathecal, subcutaneous, intraventricular, transdermal, intradermal, rectal, intravaginal, intraperitoneal, mucosal, nasal, buccal, enteral, sublingual; by intratracheal instillation, or bronchial instillation. In general, the most appropriate route of administration will depend upon a variety of factors including the nature of the cell comprising the construct or the native construct (e.g., its stability in the environment of the gastrointestinal tract), the condition of the subject (e.g., whether the subject is able to tolerate the chosen route of administration), etc.

[0153] The exact amount of the cell comprising the construct or the native construct required to achieve a therapeutically or prophylactically effective amount will vary from subject to subject, depending on species, age, and general condition of a subject, severity of the side effects, identity of the particular compound(s), mode of administration, and the like. The amount to be administered to, for example, a child or an adolescent can be determined by a medical practitioner or person skilled in the art and can be lower or the same as that administered to an adult.

[0154] A number of embodiments of the disclosure have been described. Nevertheless, it will be understood that various modifications may be made without departing from the spirit and scope of the invention. Accordingly, other embodiments are within the scope of the following claims.

[0155] By way of non-limiting illustration, examples of certain embodiments of the present disclosure are given below.

### EXAMPLES

[0156] The following examples are set forth below to illustrate the compositions, devices, methods, and results according to the disclosed subject matter. These examples are not intended to be inclusive of all aspects of the subject matter disclosed herein, but rather to illustrate representative methods and results. These examples are not intended to exclude equivalents and variations of the present invention which are apparent to one skilled in the art.

### Example 1: Transcriptional Programming in a Bacteroides consortium

[0157] Bacteroides species are prominent members of the human gut microbiota. The prevalence and stability of Bacteroides in humans make them ideal candidates to engineer as programmable living therapeutics. Herein, a biotic decision-making technology is reported in a community of Bacteroides (consortium transcriptional programming) with genetic circuit compression. Circuit compression requires systematic pairing of engineered transcription factors with cognate regulatable promoters. In turn, the compression workflow is demonstrated by designing, building, and testing all fundamental two-input logic gates dependent on the inputs isopropyl-β-D-1-thiogalactopyranoside and D-ribose. Complete sets of logical operations were deployed in five human donor Bacteroides, with which sequential gain-of-function control is demonstrated in co-culture. Finally, transcriptional programs are coupled with CRISPR interference to achieve loss-of-function regulation of endogenous genes—demonstrating complex control over community composition in co-culture. This work provides a powerful toolkit to program gene expression in Bacteroides for the development of bespoke therapeutic bacteria.

### Introduction

[0158] The human gastrointestinal (GI) tract harbors a microbial ecosystem of enormous complexity that contributes significantly to the health of the host. Evidence continues to emerge connecting the GI microbiota with health and disease states not only in the immediate vicinity of the GI tract, but systemically as well. Many studies involving the GI microbiota leverage metagenomic data to investigate how its highly variable composition across age and demographics can be connected to health conditions. In contrast, several studies have investigated the impact of individual species on the microbiota through functional genomics and targeted manipulation of GI communities. The vast majority of microbes inhabiting the GI tract are obligate anaerobes that are not readily amenable to genetic manipulation. This poses a challenge to synthetic biologists who seek to reprogram these microbes to perform useful functions beyond native capabilities. Bacteroides spp. have emerged as promising chassis cells for genetic engineering as a result of knowledge gained over several decades of studies. Their long-term stability in the human colon make Bacteroides attractive candidates for engineering as therapeutic bacteria to modulate their host's immune system by executing bespoke genetic programs, in addition to facilitating the programmed delivery of therapeutic payloads. While living therapeutics have been developed using bacteria such as Escherichia coli (E. coli) Nissle 1917 and Lactococcus lactis, these strains are typically cleared from the host within days to weeks, limiting their long-term utility. Accordingly, there is an impetus to develop a universal programming structure in Bacteroides for use as complex diagnostic tools, living-therapeutics, or for the study of these important contributors to the human microbiota, as Bacteroides can function for months to years in situ. Recent efforts have focused on developing genetic regulatory tools specifically for Bacteroides thetaiotaomicron (B. thetaiotaomicron), as parts developed in E. coli tend to be incompatible with the transcription-translation machinery of Bacteroides. With the intent of engineering select Bacteroides as putative chassis cells for further development and study, a small number of inducible promoters regulated by transcription factors have been reported, as well as promoters regulated by dCas9-sgRNA repression. Notably, Cello genetic circuit design software was recently implemented in B. thetaiotaomicron, demonstrating that higher-order transcriptional logic could be achieved in this chassis cell.

[0159] It was recently reported that the partial development of an application-agnostic decision-making technology (transcriptional programming) deployed in E. coli that leverages systems of engineered transcription factors and accompanying non-natural regulated promoters (See, Rondon et al. Transcriptional programming using engineered systems of transcription factors and genetic architectures. Nat Commun 10, 4784 (2019) and Groseclose et al. Engineered systems of inducible anti-repressors for the next generation of biological programming. Nat Commun 11, 4440 (2020)). Herein, it is reported that the transference of transcriptional programming and the development of all 16 fundamental logical operations in B. thetaiotaomicron in addition to four additional Bacteroides species (B. fragilis, B. ovatus, B. uniformis, and B. vulgatus) forms a programmable Bacteroides consortium. By combining networks of BUFFER and NOT gates in the form of single transcription factors, all 16 two-input logic gates were systematically constructed regulating a luciferase output—representing a gain-of-function programming structure. Compared to state-of-the-art genetic circuits with similar control features, the logic gates reported here are notably compressed in terms of regulated promoters and genetic parts required to build them—while possessing high performance in terms of dynamic range. In addition, the transcriptional programming system was coupled with CRISPR interference (CRISPRi) to extend control to both heterologous and endogenous genes—i.e., as a programmable loss-of-function (knockdown) technology. Moreover, said transcriptional programming technologies were deployed in co-culture to form concurrent, asymmetric, and sequential decision-making within consortia of chassis cells. First, the utility of a set of non-congruent transcriptional programs paired with CRISPRi in a simple consortium demonstrated the ability to regulate the asymmetric fitness of individual species in co-culture. In turn, sequential asymmetric programming to confer gain-of-function in a separate consortium was achieved. The consortium-based transcriptional programming framework presented here serves as a foundation for next-generation living therapeutics, and provides a powerful technology to advance the general study of the Bacteroides genus.

### Results

[0160] Conferring repression and complementary anti-repression in B. thetaiotaomicron using engineered transcription factors. In previous studies, four sets of signal-distinct repressors and complementary anti-repressors were used—based on the LacI/GalR topology—that could be directed to seven independent promoters in E. coli. (see FIG. 1A). This collection of engineered transcription factors (TFs) resulted in 56 single-input logical operations constructed via the systematic pairing of a transcription factor and cognate DNA operator-promoter element—i.e., 28 BUFFER gates and 28 NOT gates. Each repressor and cognate operator-promoter can be regarded as a BUFFER logical operation, whereas each anti-repressor and corresponding genetic element can be regarded as a NOT logical operation. Previous studies demonstrated that the LacI transcription factor (i.e., structural and mechanistic design template) was functional in B. thetaiotaomicron. Accordingly, many (if not all) of the 56 logical operations developed and tested in E. coli were posited to be functional in the B. thetaiotaomicron chassis cell. The goal herein was to identify at least two sets of repressors and complementary anti-repressors to facilitate the full development of transcriptional programming (i.e., via the demonstration of the systematic design, build, and test of all 16 fundamental two-input logical operations) in the B. thetaiotaomicron chassis cell. Given that two sets of engineered transcription factors—i.e., LacI (I⁺_{ADR})+anti-LacI (I^{A}_{ADR}), and RbsR (R⁺_{ADR})+anti-RbsR (R^{A}_{ADR})—resulted in significant performance in E. coli the search was focused on the best performing subset of logical operations, see FIG. 8 and FIG. 1A for a full description of nomenclature and description of the complete set of transcription factors. In brief, 5 out of the 7 alternate DNA binding recognition (ADR) functions (i.e., ADR=YQR, TAN, HQN, GKR or KSL) for said transcription factors and cognate operator-promoters resulted in greater than 20-fold dynamic range in E. coli—i.e., resulting in a putative set of 20 non-synonymous BUFFER gates, and a set of 20 non-synonymous NOT gates targeted for development in the B. thetaiotaomicron chassis cell.

[0161] Initially, each operation was designed, built, and tested as a standard single-operator promoter system in B. thetaiotaomicron. In addition, given that common reporters like green fluorescent protein are not amenable to maturation in anaerobic environments used to culture B. thetaiotaomicron, NanoLuc luciferase was used as the regulated gene output interface. Most (>80%) of the transcription factors displayed inadequate fold-changes as single-operator promoter systems, regardless of the placement of the operator—i.e., whether at the core or proximal position alone (see Example 2). Because each DNA operator-promoter was restricted to a single (genome integrated) copy, it was contemplated that the apparent affinity for protein-DNA interaction was affected. In turn, an in-tandem operator-promoter was leveraged in which two DNA operators were used, one intercalated between the −33 and −7 hexamer and the other proximal to the transcription start site (TSS) (FIG. 1 inset, FIG. 9, and Example 2). Using this alternate architecture to direct the cognate transcription factors resulted in the identification of two sets of complementary logical operations with satisfactory performance metrics (i.e., dynamic range greater than 20). Briefly, in the B. thetaiotaomicron chassis cell 5 BUFFER gates were identified that responsive to isopropyl-β-D-1-thiogalactopyranoside (IPTG) (FIG. 1B), 5 BUFFER gates responsive to D-ribose (FIG. 1C), 5 NOT gates responsive to IPTG (FIG. 1D), and 5 NOT gates responsive to D-ribose (FIG. 1E). Notably, each set of transcription factors for a given logical operation could be independently directed to five separate cognate operator-promoters—i.e., P_{O1}, Pₜₜₐ, P_{ttg}, P_{agg}, or P_{gac}—without cross interaction (see FIG. 1 and FIG. 10). In addition, the dose response of I⁺_{YQR}, R⁺_{YQR}, I^{A}_{YQR}, and R^{A}_{YQR} was tested to verify the ligand concentrations that correlated to the ON-states and OFF-states for repressors and anti-repressors, respectively (FIG. 11). Achieving this milestone facilitated the systematic transition from single-input logical operations to two-input (one layer) logical operations.

[0162] Constructing fundamental sets of two-input single-output logical operations in B. thetaiotaomicron. An important feature of the system of transcription factors is the ability to systematically pair two non-synonymous transcription factors via one regulated promoter (one layer) to construct fundamental two-input logical operations. In principle, using a single tandem operator-promoter genetic architecture four simple (one layer) two-input single-output combinational programs can be constructed—i.e., (i) AND, (ii) NOR, (iii) A NIMPLY B, and (iv) B NIMPLY A. To construct a two-input AND gate in the B. thetaiotaomicron chassis cell, two non-synonymous repressors I⁺_{YQR} and R⁺_{YQR} were paired (i.e., two BUFFER gates that were responsive to different input signals) and directed both transcription factors to a single cognate P_{O1} tandem operator-promoter, which regulated a luciferase output (FIG. 2A). The corresponding phenotype objectively resulted in an AND logical operation, where the circuit only allowed the production of luciferase when IPTG and D-ribose were both present. Next, an antithetical NOR gate was constructed using the same P_{O1} tandem operator-promoter (FIG. 2B). However, for the NOR gate I^{A(9)}_{YQR} with R^{A(1)}_{YQR} was paired, directing both anti-repressors (i.e., two non-synonymous NOT operations) to the same DNA regulatory element. The resulting two-input NOR logical operation functioned as expected—where the addition of IPTG or D-ribose resulted in the rejection of the luciferase output.

[0163] In addition, single-input BUFFER and NOT gates directed via the same P_{O1} tandem operator-promoter were mixed to form two-input NIMPLY logical operations. Namely, by pairing I⁺_{YQR} with R^{A(1)}_{YQR} an A NIMPLY B logical operation was generated (FIG. 2C). Likewise, the B NIMPLY A logical operation was obtained via the complementary set of transcription factors—i.e., I^{A(9)}_{YQR} with R⁺_{YQR} (FIG. 2D). To demonstrate that single-layer gate construction was generalizable when directed to different promoter elements, AND, NOR, A NIMPLY B, and B NIMPLY A were constructed via two additional tandem operator-promoters—Pₜₜₐ, and P_{agg}—which are cognate to the TAN and KSL DNA binding domains of a given transcription factor, respectively, but orthogonal to one another (FIG. 12). Qualitatively, all logical operations constructed from the transcription factors with alternate DNA binding functions resulted in the same objective phenotypes observed for sets directed to the P_{O1} tandem operator-promoter. However, quantitatively the dynamic range was variable, and it was contemplated that this was due to variation in promoter strength, in addition to any differences in the inherent protein-DNA interactions.

[0164] Combinational (feedforward) programming in B. thetaiotaomicron and circuit compression. In principle, given: (i) 2 non-synonymous repressors, (ii) 2 antithetical anti-repressors, (iii) 3 orthogonal operator-promoters, and (iv) the ability to feedforward information—all 16 Boolean logic gates can be systematically constructed via transcriptional programming (FIG. 13A). An important feature of this programming structure is that the (or compress) gate construction can be constructed via coupled anti-repression—even in the context of feedforward processing—resulting in the reduction of the endogenous resources required for operation. The gate compression is defined in terms of the number of inducible promoters for a given logical operation, relative to similar logic gates constructed in other biotic systems—see Example 2. To test these assertions, all remaining two-input gates that required the use of feedforward processing in the B. thetaiotaomicron chassis cell—namely, OR, NAND, A IMPLY B, B IMPLY A, XOR, and XNOR (see FIG. 3 and FIG. 14) were built, designed, and tested. The rational design and construction of the remaining feedforward gates was informed by the performances of the individual transcription factors (see FIG. 9 and Example 2). The design-build-test cycles were initiated focusing on the development of simple two-layer feedforward logical operations in which the following was paired: (i) a single-input single-output logical operation with the output defined as a single non-synonymous transcription factor, with (ii) a second layer that contained a regulatable promoter and luciferase output. Using this general workflow, OR, NAND, (FIGS. 3C, 3D and FIGS. 15G and 15H) was constructed and both IMPLY logical operations (FIGS. 14C, 14D and FIGS. 15I, 15H, and 15J). Next, complex feedforward logical operations composed of three layers were constructed and tested in which (i) 2 single-input single-output circuits (where the output for each primary layer was defined as a non-synonymous transcription factor) operated in parallel, relative to (ii) a second layer composed of a regulatable promoter (upstream of a luciferase output) with the capacity to direct and couple the transcription factors from the previous layer. This workflow allowed for construction of two of the most complex logic gates from a Boolean perspective—XNOR and XOR (FIGS. 3E, 3F, and FIGS. 15K and 15L). Qualitatively, all representative two-input feedforward gates resulted in the correct input-output phenotype, with dynamic ranges greater than 50.

[0165] To illustrate circuit compression, a relative comparison of transcriptionally programmed circuits was conducted to Cello circuits (the state-of-the-art in gene circuit design), a chemical wires approach that utilized multiple chassis cells, and general Boolean NOR layering (logical axiom), (FIG. 3 and FIG. 15). The relative comparison was achieved by way of counting the number of regulated promoters used to construct a given circuit—also see Example 2. However, in the case of abstract Boolean NOR layering an input node was regarded as a promoter equivalent. In every two-input case, transcriptional programming achieved significant circuit compression over chemical wires and general Boolean NOR layering. While the chemical wires and Boolean approaches provide a broader context for the evaluation of circuit compression, the most meaningful relative comparison was to the Cello genetic circuits—as this technology contains a given circuit to a single chassis cell, akin to transcriptional programming (FIGS. 3, 14, and 15). In all cases (with the exception of BUFFER and OR) transcriptional programming resulted in significant circuit compression—i.e., required significantly fewer promoters. In the case of the BUFFER and OR gates, transcriptional programming was on par with Cello—requiring one and two promoters, respectively. Notably, the OR gate is a unique (ad hoc) Cello construct composed of two tandem promoters. In other words, if the OR gate was constructed via inversion alone it would require a minimum of four promoters (FIG. 15G and Example 2). To illustrate circuit compression, the XNOR and XOR gates can be used as exemplars of the extent of gate compression that can be achieved via transcriptional programming—as these are the two most complex logical operations developed from a NOR programming perspective. In both cases approximately a three-fold decrease in circuit complexity (promoter requirements) was achieved via transcriptional programming—relative to Cello circuit designs. Notably, the XOR logical operation represents the most direct comparison between Cello and transcriptional programming in the same chassis cell—herein both gates have been constructed in B. thetaiotaomicron. Namely, the Cello XOR gate was composed of 8 regulated promoters and two output genes while the XOR gate constructed via transcriptional programming only required 3 promoters and one output gene (FIG. 3G).

[0166] Transferring transcriptional programming to human donor Bacteroides chassis cells. Once transcriptional programming in B. thetaiotaomicron was established, it was contemplated that the programming edifice extended to other Bacteroides. Accordingly, all single-input (BUFFER and NOT) logical operations were tested in four additional Bacteroides species that are commonly found in humans—i.e., B. fragilis, B. ovatus, B. uniformis, and B. vulgatus (FIG. 1). Namely, 10 non-synonymous BUFFER gates composed of the 5 I⁺ repressors and 5 R⁺ repressors and 5 cognate and orthogonal operator-promoters were tested—i.e., the same set developed in B. thetaiotaomicron (see FIGS. 1B, 1C, and FIG. 9). Qualitatively, all 10 BUFFER gates were functional in B. fragilis, B. ovatus, B. uniformis, and B. vulgatus. Moreover, the general performance of each BUFFER operation was similar between Bacteroides strains and comparable to the performances and trends observed with variation in DNA-binding function in B. thetaiotaomicron. Next, each of the antithetical NOT unit operations was tested in B. fragilis, B. ovatus, B. uniformis, and B. vulgatus. In this experiment, the individual performances of the corresponding 5 I^{A(9)} and 5 R^{A(1)} anti-repressors were tested using the same 5 cognate operator-promoters (see FIGS. 1D, 1E, and FIG. 9). Congruent with previous observations, the NOT unit operations had comparable performances to those observed in B. thetaiotaomicron.

[0167] Given that both single-input logical operations (BUFFER and NOT) functioned in B. fragilis, B. ovatus, B. uniformis, and B. vulgatus, it was contemplated that the corresponding single-layer two-input logical operations—(i) AND, (ii) NOR, (iii) A NIMPLY B, and (iv) B NIMPLY A—could be constructed via the same circuit design rules used in the B. thetaiotaomicron chassis cell (FIGS. 15C, 15D, 15E, and 15F). Accordingly, the archetypal AND gate (i.e., pairing I⁺_{YQR} and R⁺_{YQR} with the P_{O1} operator-promoter) was transferred into each of the four representative Bacteroides (see FIG. 3A). Constraining the composition of the AND program allowed for conduction of a relative comparison between representative chassis cells to assess to what extent the transcriptional program was impacted by the genetic and metabolic differences between Bacteroides strains. Qualitatively, all AND gates resulted in the correct truth table—i.e., all requiring two inputs to induce the expression of luciferase. Quantitatively, all AND gates displayed large dynamic ranges (greater than 200) when comparing zero-input expression to two-input expression. The AND gate in B. uniformis was the best performing logical operation followed by B. ovatus, with dynamic ranges of 1468 and 781, respectively. The AND gates in B. fragilis and B. vulgatus were nearly on par as logical operations, with dynamic ranges of 325 and 310, respectively (under the same conditions).

[0168] Next, an antithetical NOR gate (i.e., pairing I^{A(9)}_{KSL} and R^{A(1)}_{KSL} with the P_{agg} operator-promoter) was tested in B. fragilis, B. ovatus, B. uniformis, and B. vulgatus (FIG. 3B). Each representative NOR gate resulted in the same qualitative outcome—i.e., rejecting the output in the presence of one or both input signal(s) (IPTG and D-ribose). All NOR gates had greater than 50-fold dynamic range for zero inputs (ON-state) relative to both inputs (OFF-state), with the exception of B. vulgatus which had a dynamic range of 35—which was consistent with single input logical operation performances. Congruent with the aforementioned single-layer two-input logical operations, A NIMPLY B (FIG. 14A), and B NIMPLY A (FIG. 14B) were functional across all representative Bacteroides chassis cells.

[0169] Once all fundamental single-layer logical operations were demonstrated as functional in the four representative human donor Bacteroides, the remaining two-input feedforward logic gates were tested—i.e., OR, NAND, XNOR, XOR, A IMPLY B, B IMPLY A (see FIGS. 3C, 3D, 3E, 3F, and FIGS. 145C and 14D). Here the same circuit designs was used as outlined in FIGS. 15G, 15H, 15I, 15J, 15K, and 15L. In general, all compressed two-input logic gates functioned in B. fragilis, B. ovatus, B. uniformis, and B. vulgatus—and objectively resulted in truth tables. No apparent trends emerged between chassis cells, and the moderate differences in performance between logic gates in a given chassis cell were interpreted as the result of differences in metabolic potential inherent to a given Bacteroides strain. Collectively, these results demonstrated that the compressed logic gates could generally be imbued broadly across a panoply of Bacteroides chassis cells—representing a robust tool for programmable gain-of-function that can be employed within a consortium.

[0170] Transcriptional programming paired with CRISPR interference in Bacteroides chassis cells. Given the high regulatory performance observed in the logic circuits (both simple and combinational) with inert luciferase outputs, it was contemplated that transcriptional programming could be effectively paired with CRISPR interference (CRISPRi) technology—in each of the representative Bacteroides chassis cells. To test this assertion, iterations of regulated single guide RNA (sgRNA) were first built, designed, and tested that targeted the NanoLuc reading frame in B. thetaiotaomicron (FIG. 4A). Briefly, a BUFFER gate (I⁺_{YQR} with cognate operator-promoter P_{O1}) was developed that regulated the production of the sgRNA transcript aimed at knocking down NanoLuc expression upon induction with IPTG. The P_{cfxA} promoter with tandem core and proximal operators was modified to allow for the production of functional sgRNAs. A hammerhead (HH) ribozyme was fused 4 bp downstream of the proximal operator, followed by the 102 bp sgRNA scaffold and a hepatitis delta virus (HDV) ribozyme. The inclusion of the ribozymes ensured that the minimal sgRNA was produced following transcription, cleaving extraneous 5′ and 3′ sequences. For all CRISPRi experiments, dCas9 was constitutively expressed from the P₁ promoter and no modification was made to the expression levels of transcription factor regulators. Congruent with the design goal, induction of the BUFFER gate resulted in a ˜40-fold reduction of observed NanoLuc production—thus demonstrating that the system is an effective tool for knocking down a given gene in B. thetaiotaomicron. It was contemplated that this circuit would be functional in the four additional Bacteroides species, given the universal results of the transcriptional programming circuits demonstrated in the aforementioned results FIGS. 1 and 3). To test this assertion, the said synthetic circuit was introduced into the remaining Bacteroides chassis cells and measured the inducible NanoLuc knockdown performances (FIG. 4A). In all cases, each of the engineered chassis cells performed the inducible knockdown of the heterologous luciferase on par or better than that observed in the B. thetaiotaomicron chassis cell.

[0171] Next, the antithetical NOT gate paired with a CRISPRi genetic circuit was constructed in the B. thetaiotaomicron chassis cell. Here, the basic NOT operation was executed by the I^{A(9)}_{YQR} anti-repressor and cognate operator-promoter P_{O1} (FIG. 4B). As anticipated, this simple synthetic circuit resulted in a reciprocal phenotype upon anti-induction via the introduction of the IPTG ligand with a 110-fold dynamic range. Likewise, the integration of this permissive maintenance-of-function circuit (i.e., with ligand) resulted in similar phenotypes in each of the disparate representative Bacteroides chassis cells—i.e., B. fragilis, B. ovatus, B. uniformis, and B. vulgatus (FIG. 4B).

[0172] As evidenced with previous results, the successful implementation of the I⁺_{YQR} (BUFFER gate) and I^{A(9)}_{YQR} (NOT gate) with the cognate operator-promoter P_{O1} in a given chassis cell is a strong indicator that the broader transcriptional programming structure can be paired with CRISPR technologies. Here the justification was based on the observation that nearly all remaining single-input and two-input logical operations have similar or better fundamental performances relative to the tested circuits. Moreover, given the results of the single-input systems it was contemplated that all additional single-input and two-input logical operations could be used to regulate the production of any sgRNA transcript. Accordingly, additional iterations of this tool were not tested; rather, this assertion was demonstrated via case studies in which carbon utilization was manipulated in Bacteroides.

[0173] Controlling carbon utilization in Bacteroides via single-input programming. Bacteroides possess the ability to degrade a large number of polysaccharides due to specialized gene clusters termed polysaccharide utilization loci (PULs), see FIG. 4D. Bacteroides species harbor many PULs, each of which contain genes involved in the recognition, import, and degradation of a specific class of polysaccharide. Notably, different species in this genus often possess different catabolic abilities and cannot all utilize the same carbon sources. It has been previously demonstrated that controlling dietary carbohydrate composition can allow for stable colonization of Bacteroides possessing the requisite PUL machinery. This shows that GI population dynamics can be directly manipulated via a combination of specialized diet and in situ activation of transcriptional programs linked to PUL expression.

[0174] To demonstrate the utility of the programming edifice paired with CRISPRi, it was contemplated that sgRNAs could be designed to target SusC homologues implicated in the extracellular import of two relevant polysaccharides (inulin and amylopectin) for B. thetaiotaomicron, B. uniformis, and B. ovatus. The archetypal susC gene (starch utilization system gene C) in B. thetaiotaomicron is necessary for growth of this species on starch, and its homologues are highly conserved in Bacteroides PULs. The rationale for selecting these polysaccharides is that they represent two distinct classes of molecules implicated in GI microbiota homeostasis and are universally consumed by these three Bacteroides. Accomplishing this objective would enable control over population dynamics in the presence of a common (communal) carbon source. At the outset, simple monoculture experiments were conducted in which a LacI BUFFER operation was used to regulate the production of a sgRNA targeting SusC homologues in separate B. thetaiotaomicron, B. uniformis, and B. ovatus chassis cells as monocultures (FIGS. 4B and 4D). In B. uniformis and B. ovatus, the SusC homologue implicated in the uptake of inulin was targeted, whereas in B. thetaiotaomicron the SusC gene involved in the uptake of amylopectin was targeted. Using a simple synthetic circuit composed of an I⁺_{YQR} repressor and cognate regulated promoter P_{O1} (BUFFER gate), all three chassis cells resulted in the strong knockdown of the given PUL upon the addition of IPTG (FIG. 4E and FIGS. 16A, 16B, and 16C). This was observed as a loss of fitness for each monoculture in which a single carbohydrate (i.e., inulin or amylopectin) was present in the defined minimal media. Next, an analogous BUFFER CRISPRi synthetic circuit replacing the I⁺_{YQR} regulator with the R⁺_{YQR} repressor targeted at regulating the production of the same sgRNAs was built and tested. Congruent with the previous synthetic circuit, the introduction of the input signal D-ribose (in the corresponding defined minimal media) resulted in a loss of fitness in all three Bacteroides chassis cells in monoculture (see FIG. 4F and FIG. 16D

[0175] Controlling carbon utilization in Bacteroides via combinational (two-input) programming in monoculture. Given the strong performance of the single-input logical operations in managing the knockdown of a select PUL, it was contemplated that a fundamental two-input logic gates could be constructed to demonstrate more complex decision-making in the context of carbon utilization in select Bacteroides chassis cells in monoculture. First, a simple AND gate was built and tested to regulate the uptake and utilization of inulin and amylopectin in B. uniformis and B. thetaiotaomicron, respectively. In addition, in the B. ovatus chassis cell a NOR gate as well as an OR gate was built and tested in which the production of the SusC transporter was regulated implicating in the uptake of inulin in monoculture. Congruent with the loss-of-function (fitness) via inverted logic imposed by BUFFER regulated CRISPRi, the AND gates resulted in loss of fitness only when both ligands were present (FIG. 5A and FIG. 16E). In contrast, the NOR gate was permissive in the B. ovatus chassis cell when one or more ligands were present (FIG. 5B). In turn, the OR gate in the B. ovatus chassis cell only resulted in fitness of the monoculture when both ligands were absent (FIG. 5C). This set of experiments demonstrated the application of single-layer (AND, NOR) in addition to feedforward (OR) two-input logic gates as tools that can be used to manage the fitness of individual Bacteroides in monoculture.

[0176] Controlling communal carbon utilization in Bacteroides via combinational programming in co-culture. Finally, a simple consortium composed of B. uniformis with an AND gate and B. ovatus with an OR gate regulating the production of sgRNAs complementary to the SusC transporters involved in inulin uptake in each chassis cell was constructed (FIG. 6). The purpose of this experiment was to demonstrate the ability to asymmetrically program the fitness of a co-culture with a defined communal carbon source. To accomplish this, a different assay was implemented in which fitness of each Bacteroides species in co-culture was accounted for via colony forming units (CFU)—given that the batch growth assay in liquid media was not amenable to distinguishing between chassis cells. Each chassis was intentionally constructed with a different antibiotic resistance to allow for their distinguishment when plated on selective BHI agar plates (Methods). The CFU assay for B. uniformis and B. ovatus in monoculture was congruent with the results obtained in batch growth—accordingly, the two assays are regarded as comparable (FIGS. 11F and FIGS. 16F and 16G). In brief, at 12 hours or greater when the co-culture had no ligands present, B. ovatus and B. uniformis retained similar fitness in co-culture (FIG. 6). Upon the addition of IPTG or D-ribose, only B. uniformis retained fitness and could uptake inulin. However, upon the addition of both ligands, B. ovatus and B. uniformis both experienced loss-of-fitness in the presence of the sole carbon source inulin, as expected.

### Discussion

[0177] Programmable Bacteroides in co-culture. Herein, given the constraint that one out of 16 Boolean logical operations (simple transcriptional programs) can be imbued in a given Bacteroides chassis cell, the programming space for two chassis cells in co-culture can be defined by 256 non-synonymous input-output sets (FIG. 13). As presented, the input-output consortia sets can facilitate concurrent and sequential (repeated-addition) information processing for gain-of-function for a given Bacteroides co-culture. In addition, this programming structure allows the user to construct systems that can imbue symmetric and asymmetric gene regulation between two (or more) chassis cells. To demonstrate sequential programming with asymmetric gene regulation ability, a simple consortium composed of B. thetaiotaomicron and B. ovatus imbued with an AND logical operation and a NOR logical operation was constructed, respectively. Each logical operation regulated the production of luciferase as a proxy for gain-of-function in a given chassis cell (FIG. 7). Similar to gain-of-function transcriptional programming, a loss-of-function between chassis cells can be programmed, asymmetrically, concurrently, and sequentially, also see Example 2.

[0178] Consortium transcriptional programming offers a powerful tool that can be used for the advanced study of the gut microbiota. Transcriptional programming can be regarded as universal, and it is contemplated that other consortia (beyond the human gut) with complex decision-making capabilities can be imbued. In addition to the ability to use this platform to study community behavior, the programmable Bacteroides communities can also be used as the foundation for the development of living therapeutics—which will be the focus of future studies. Notably, the simple sugars allolactose (the natural analog of IPTG) and D-ribose can be consumed and show no evidence of toxicity to Bacteroides or host (human) primary cells—in support of progressing this technology to an advanced living therapeutic.

### Methods

[0179] Bacterial strains and media. Bacteroides strains used in this study were B. thetaiotaomicron (ATCC 29148), B. fragilis (ATCC 25285), B. ovatus (ATCC 8483), B. uniformis (ATCC 8492), and B. vulgatus (ATCC 8482). Bacteroides strains were routinely cultured anaerobically at 37° C. without shaking using TYG broth or BHI agar (Difco), unless otherwise specified. One liter of TYG broth contains: [10 g tryptone, 5 g yeast extract, 2.5 g D-glucose, 0.5 g L-cysteine, 13.6 g KH₂PO₄, 9.2 mg MgSO₄, 1 g NaHCO₃, 80 mg NaCl, 8 mg CaCl₂, 1 mg menadione, 0.218 mg FeSO₄, 5 μg vitamin B12, and 1 ml histidine hematin solution (1.2 mg/ml hematin in 0.2 M histidine, pH 8.0)]. L-cysteine was resuspended in water and sterile filtered (0.2 μm VWR 28145-477). Menadione was resuspended in 100% ethanol. L-cysteine and menadione were prepared and added to autoclaved media immediately prior to inoculation. Antibiotics for Bacteroides were used as appropriate: erythromycin (25 μg/ml), gentamicin (200 μg/ml), and tetracycline (2 μg/ml). IPTG and D-ribose were used as inducers at a final concentration of 10 mM, unless otherwise specified. E. coli strains used were EC100D pir-116 (for cloning) and S17-1λ pir (for conjugation). E. coli harboring pNBU-based plasmids were routinely cultured aerobically in LB Miller Media at 37° C. with shaking, or on LB agar, supplemented with 100 μg/ml carbenicillin.

[0180] Cloning and plasmid construction. The backbone vectors for pNBU1 and pNBU2 were kind gifts from C. Voigt (MIT). Transcription factors were cloned from in-house vectors while NanoLuc was provided on the pNBU2 vector from C. Voigt. All molecular cloning was performed in E. coli EC100D pir-116. Genetic constructs were created using Golden Gate assembly and Gibson cloning. DNA modules were subcloned into a pUC-based vector for ease of manipulation before performing final assemblies. Q5 polymerase (NEB M0491L) was used for PCR involved in cloning while Phusion polymerase (NEB M0532L) was used for colony PCR. T4 DNA ligase (NEB M0202L) and BsmBI-v2 (R0739L) were used for Golden Gate cloning. NEBuilder HiFi DNA Assembly Master Mix (NEB E2621X) was used for Gibson cloning. All DNA primers were synthesized by Eurofins Genomics. The DNA sequences of all constructs were verified by Sanger sequencing (Eurofins Genomics). Plasmids were visualized using ApE software. Relevant plasmid maps are given in FIG. 17.

[0181] Conjugation of Bacteroides. E. coli S17-1λ pir was used for conjugation of plasmids into Bacteroides. The pNBU1 vector harbors intN1 which mediates site-specific recombination of the attN1 site of pNBU1 and the attB1 site located at the 3′ end of a tRNA-Leu gene in Bacteroides genomes. Similarly, the pNBU2 vector harbors intN2 which mediates site-specific recombination of the attN2 site of pNBU2 and one of two attB2 sites located at the 3′ ends of tRNA-Ser genes in Bacteroides genomes. Simultaneous insertion of pNBU2 vectors at both sites was never observed, likely due to the necessity of having at least one functional tRNA-Ser gene. Thus, only single copy genetic circuits were stably delivered into Bacteroides genomes. Donor cultures of E. coli S17-1λ pir transformed with the appropriate pNBU1 or pNBU2 construct and recipient cultures of Bacteroides were separately grown to OD600 ˜0.5. For all strains except B. fragilis, 1 ml of donor culture and 1 ml of recipient culture were pelleted by centrifugation (5000×g 5 min.) separately and resuspended in 1 ml of PBS. This step was then repeated for a second wash. The cultures were then mixed at a ratio of 1:10 (donor:receiver) and pelleted again by centrifugation. Cells were resuspended in 100 μl PBS and spot plated on a BHI agar plate. The mating lawn was grown aerobically at 37° C. for >16 hours before being scraped into 3 ml of PBS. Serial dilutions were plated on BHI agar supplemented with gentamicin and either erythromycin for pNBU2 constructs or tetracycline for pNBU1 constructs. Resultant colonies were picked into TYG after 24-48 hours of anaerobic growth. Site-specific integration was confirmed using genome-specific primers. B. fragilis conjugation efficiency was significantly lower for unknown reasons. To remedy this, 2 ml of donor culture and 2 ml of recipient culture were combined 1:1 after the PBS wash steps. The remainder of the conjugation procedure was performed as described above.

[0182] Luciferase assay. All luciferase assays were performed using TYG broth. Overnight TYG cultures of Bacteroides were diluted 1:100 into 200 μl fresh media in a conical bottom polystyrene 96-well microplate (Nunc 249952) with the appropriate combinations of inducers. The culture was incubated statically in a Mitsubishi rectangular jar equipped with anaerobic gas packs (Mitsubishi R685070) for ˜12-14 hours to achieve a final OD of ˜0.5-0.8. 100 μl of culture was then transferred to a black, clear-bottom 96-well microplate (Corning 3631) to measure OD600. The remaining 100 μl culture was pelleted by centrifugation (4000×g 10 min.) after which the supernatant was removed. The pellet was resuspended in 20 μl of Bugbuster Mastermix (Millipore 71456) and incubated at room temperature for 30 minutes to facilitate cell lysis. The Promega Nano-Glo assay kit was used to determine expression of NanoLuc. Assay buffer and substrate were mixed as per the manufacturer recommendation (1:50 ratio of substrate to buffer). 10 μl of this mixture was transferred to a well of a flat-bottom white 96-well microplate (Costar 3912) containing 80 μl DI water. Following cell lysis, 10 μl of lysate was added to the microplate well and mixed by pipetting. After 5 minutes of incubation, the luminescence was measured with a Spectramax M2e plate reader (Molecular Devices) with 800v gain and 30 reads per well. Data was collected with SoftMax Pro Software. Background luminescence generated from Bugbuster with no cells was subtracted from each sample. Luminescence was then normalized to colony forming units (CFU) based on standard curves relating OD600 to CFU (due to the presence of heme in the growth media, OD600 measurements follow non-linear patterns when compared to CFU). For the CRISPRi luciferase knockdown experiments only, the precultures were grown in the presence and absence of inducer before being seeded into TYG with the same inducer conditions. All other precultures for luciferase assays were grown without inducer. Data was analyzed using Microsoft Excel and Graphpad Prism.

[0183] Orthogonality of DNA-binding domains and operators. To determine non-cognate interactions between DNA-binding domains (DBD) and operators, all combinations of DBDs and operators were tested for each transcription factor, yielding a set of 80 “off-diagonal” combinations (in addition to the 20 cognate interactions). To facilitate testing these interactions, 5 reporter strains of B. thetaiotaomicron were created by integrating a pNBU2 plasmid containing the NanoLuc reporter gene fused to 1 of the 5 promoter/operator pairs. These reporter strains were then integrated with pNBU1 vectors containing each of the 16 transcription factors containing the DBD not associated with their specific NanoLuc operator. The expression of NanoLuc with and without inducer was measured as described above.

[0184] CRISPRi growth curves and minimal media co-culture. Long term anaerobic culture was performed in an anaerobic chamber (Whitley, DG250) with an atmosphere of 10% H₂, 10% CO₂, and 80% N₂ (Airgas X03NI80C2000511). Bacteroides strains harboring CRISPRi circuits were first grown overnight in TYG broth (no inducer). The following morning these cultures were diluted 1:100 into fresh TYG with and without inducer(s) and grown until mid-log phase (˜6 hours). At this point the cultures were diluted 1:200 into defined minimal media (MM) containing the same inducer(s) present in the precultures. One liter of MM contains: [1.12 g (NH₄)₂SO₄, 1 g NaHCO₃, 13.6 g KH₂PO₄, 0.88 g NaCl, 5.55 mg CaCl₂), 9.5 mg MgCl₂, 1 mg menadione, 0.218 mg FeSO₄, 5 μg vitamin B12, 0.5 g L-cysteine, 1 ml histidine hematin solution, and 5 g of defined carbohydrate source]. 10 mg/ml (2X) stocks of amylopectin and inulin were autoclaved and immediately mixed with the MM components (sterile filtered) before being placed in the anaerobic chamber. TYG and MM were pre-reduced in the anaerobic chamber for >24 hours before being inoculated. IPTG was added to a final concentration of 10 mM and D-ribose was added to a final concentration of 1 mM when used as inducers. For continuous OD600 measurements, the final MM cultures were prepared in 200 μl volumes in black, clear-bottom 96-well plates. These plates were grown at 37° C. inside a portable spectrophotometer (Cerillo Stratus) placed inside the anaerobic chamber. OD600 was recorded every 20 minutes to generate growth curves. For co-culture experiments, separate precultures were grown for each species as described above. For these experiments, four precultures of each species were grown in parallel, each containing a different combination of IPTG and D-ribose (no inducer, IPTG only, D-ribose only, and both inducers). Prior to MM inoculation, the OD600 of each preculture was measured. B. uniformis and B. ovatus were then seeded together into four separate 2 ml MM cultures (containing the four combinations of inducers), with the appropriate precultures being used to seed each MM culture as described above. Based on the preculture OD600 measurements, each species was seeded at an initial density of OD600 ˜0.005. The MM co-cultures were gently mixed with pipetting, and a 10 μl aliquot was removed to assess initial population density. Additional 10 μl aliquots were removed every 4 hours for 16 hours. At the time of removal, each 10 μl aliquot was 10-fold serially diluted in sterile PBS over 7 orders of magnitude. 5 μl of each dilution was spot plated in triplicate on separate BHI agar plates supplemented with erythromycin (to assess B. uniformis growth) or tetracycline (to assess B. ovatus growth). After 24 hours of anaerobic growth, colonies were counted for each time point and species to generate separate growth curves.

[0185] Sequential programming in co-culture. B. thetaiotaomicron and B. ovatus were precultured separately in TYG with no inducers for 8 hours. After measuring the OD600 of each culture, fresh 1 ml cultures containing all combinations of inducers were seeded with both strains such that the initial OD600 of each species was ˜0.005. These four cultures were grown for 12 hours and then assayed for luciferase activity (Methods). At this time, the inducer-free culture was diluted 1:100 into three separate 1 ml cultures containing either IPTG, D-ribose, or both ligands. The IPTG-containing and D-ribose-containing cultures were similarly diluted 1:100 into new 1 ml cultures containing both ligands. These five new cultures were grown for 12 hours and subsequently assayed for luciferase activity.

### Data Availability

[0186] The sequences of the following plasmids are provided in GenBank and as Source Data with respective accession numbers: pBH001-pBH002 (ON060706-ON060707), pBH101-pBH120 (ON060708-ON060727), pBH201-pBH212 (ON060728-ON060739), pBH301-pBH306 (ON060740-ON060745), pBH501-pBH513 (ON060746-ON060758).

### Example 2: Transcriptional Programming in a Bacteroides consortium

[0187] Intelligent biotic system—definition. Herein, an intelligent biotic system is defined as one or more chassis cells capable of (i) decision-making, (ii) coupled memory development, (iii) and communication between chassis cells and/or the host.

[0188] Low performing transcription factors in B. thetaiotaomicron—Justification and alternate design. Most of the transcription factors displayed inadequate fold-changes when regulating promoters with an operator at the core or proximal position alone. Generally, weak repression was observed evidenced by high basal expression levels when the transcription factor was bound to DNA. It was contemplated that the performance of a given logical operation could be improved via increasing the apparent affinity of the transcription factor by doubling the number of DNA binding sites by way of tandem operators. The general design of the in-tandem operator-promoter was composed of two DNA operators, one intercalated between the −33 and −7 hexamer and the other proximal to the TSS (FIGS. 8 and 9). In principle, this design maintains the ability to concurrently direct the binding of one or more cognate transcription factors while preserving orthogonal DNA binding. NOTE: The general form of this genetic architecture has been designated as a series-parallel (SE-PA) operator function.

[0189] Transcriptional programming and construction of feedforward gates. The development of a complete set of 16 logical operations via transcriptional programming is predicated on a definitive bottom-up combinational rule set. Specifically, single-input single-output operations (BUFFER and NOT) represent the fundamental binaries, that can be systematically combined to create all proper two input single-output operations (AND, NOR, A NIMPLY B, B NIMPLY A, OR, NAND, A IMPLY B, B IMPLY A, XOR, and XNOR). Rational construction of feedforward gates was informed by the performances of the individual transcription factors (FIG. 9). The PO1 and Ptta promoters were chosen for the first layer due to their higher maximum output when compared to the other inducible promoters developed. This was done to ensure a saturating amount of transcription factor would be produced to act on the final output promoter. The Pttg promoter was chosen as the final output promoter given its high performance (minimal “leaky” expression) when controlled by any of the four XHQN transcription factors (X=I+, IA, R+ or RA).

[0190] Circuit compression and factors beyond the inducible promoters. Circuit compression is defined as a reduction in the number of inducible promoters between any two genetic circuits with comparable operation or function. It should be noted that other factor such as the number of constitutive promoters that are required to operate the circuit are equivalent (or fewer) between said genetic circuits. The Cello circuits discussed herein are constructed via in inversion3 which will utilize equivalent numbers of constitutive promoters relative to transcriptional programming, or by way of the concurrent expression of dCas94, which will utilize an additional constitutive promoter relative to transcriptional programming (T-Pro). Accordingly, given that the number of constitutive promoters used in transcriptional programming will be equal or less than synonymous Cello circuits, the number of constitutive promoters was not factored in to the accounting for compression—although in such cases where this becomes significant constitutive promoters can be included.

[0191] It was contemplated that given two synonymous circuits (e.g., XOR—Cello vs. XOR—T-Pro, FIG. 3G) the compressed circuit in which promoter strengths and RBS strengths on average (i.e., translation and transcription) are on par between inducible promoters, the compressed circuit will utilize fewer cellular resources. To test this assertion would require an assessment of growth rates, ribosome profiling, and RNAseq analysis—in addition to using approximately equivalent production machinery, i.e., promoter strength and RBS strength, and perhaps normalizing protein lifetimes—which is beyond the scope of the present invention.

[0192] Cello Gates. Cello circuit design3 leverages tandem promoters to create OR and NOR gates that can be connected in a modular fashion. The OR gate was developed by placing two distinct, inducible promoters upstream of a sequence of interest such that induction of either or both promoters resulted in production of the downstream target5 (FIG. 15G). The NOR gate was achieved by inverting the OR gate and adding a second regulated output promoter (FIG. 15D).

[0193] Specifically, the output of the OR gate is a repressor that acts on a second regulated promoter, controlling production of the final output. The tandem promoter setup allows for the construction of a 2-promoter OR gate rather than a 4-promoter OR gate which was achieved using a pure layering approach (FIG. 18G). Additionally, the resulting NOR gate uses the same number of promoters as required from a layering approach (FIG. 15D). The use of tandem promoters results in several technical challenges—evident from the general architecture. Namely, unequal output levels may be observed for an OR gate if the tandem promoters affect one another's activity. Nielsen and coworkers describe one such phenomenon as “roadblocking”, where a downstream promoter prevents the upstream promoter from transcribing the target sequence. Accordingly, roadblocking limits the number of regulated promoters that can be used in a tandem fashion, adding an additional constraint to Cello designed circuits.

[0194] Dynamics of repeated addition and concentration dependence. As demonstrated herein, biological signal processing can be achieved by way of allosteric transcription factors (native and engineered). For example, in regulatory systems that utilize the lactose repressor, an input signal results in the induction of the transcription factor and objectively switches gene expression from an OFF-state to an ON-state. In the given biological system to revert the gene expression back to the OFF-state requires the aggressive dilution of the input signal which can take one or more days to achieve in a typical biotic system. Kinetic studies using the engineered BANDPASS and BANDSTOP transcription factors have shown that collection of signal processing filters can switch between states of gene expression within a few minutes (opposed to days). It is contemplated that given that I⁺_{YQR}, R⁺_{YQR}, I^{A}_{YQR}, and R^{A}_{YQR} are predicated on the same topology and basic functional mechanism of the repeated addition programs have similar dynamic features. In addition, the maintenance of an induced ON-state or OFF-state will require ligand concentrations of −1 mM or higher. Noting that said features will be important in subsequent implementation of this methodology. Given that the collection of transcription factors are only inducible at higher ligand concentrations than would be observed in native environments, the unintended activation of said genetic circuits is mitigated, see FIG. 11. In addition, transcriptional programs that involve repeated addition are thought to also have the capacity to rapidly transition between states based on observations of the dynamics of systems with similar mechanistic features.

[0195] It will be apparent to those skilled in the art that various modifications and variations can be made in the present disclosure without departing from the scope or spirit of the invention. Other embodiments of the disclosure will be apparent to those skilled in the art from consideration of the specification and practice of the methods disclosed herein. It is intended that the specification and examples be considered as exemplary only, with a true scope and spirit of the invention being indicated by the following claims.

TABLE 1
Plasmid Constructs and the corresponding sequence identification numbers.

| | Genetic | | | Sequence |
|---|---|---|---|---|
| Designation | Parts | Backbone | Description | ID No. |
| pBH001 | intN2_ErmG_Bla_LacZ_BsmBIsites | NBU2 | cloning | SEQ ID |
| | | | vector | NO: 29 |
| pBH002 | intN1_TetQ_Bla_LacZ_BsmBIsites | NBU1 | cloning | SEQ ID |
| | | | vector | NO: 30 |
| pBH101 | LacI(YQR)_pCFXA_O1CP_nanoluc | NBU2 | BUFFER Gate | SEQ ID |
| | | | LacI(ADR) | NO: 31 |
| pBH102 | LacI(TAN)_pCFXA_OttaCP_nanoluc | NBU2 | BUFFER Gate | SEQ ID |
| | | | LacI(ADR) | NO: 32 |
| pBH103 | LacI(KSL)_pCFXA_OaggCP_nanoluc | NBU2 | BUFFER Gate | SEQ ID |
| | | | LacI(ADR) | NO: 33 |
| pBH104 | LacI(HQN)_pCFXA_OttgCP_nanoluc | NBU2 | BUFFER Gate | SEQ ID |
| | | | LacI(ADR) | NO: 34 |
| pBH105 | LacI(GKR)_pCFXA_OgacCP_nanoluc | NBU2 | BUFFER Gate | SEQ ID |
| | | | LacI(ADR) | NO: 35 |
| pBH106 | RbsR(YQR)_pCFXA_O1CP_nanoluc | NBU2 | BUFFER Gate | SEQ ID |
| | | | LacI(ADR) | NO: 36 |
| pBH107 | RbsR(TAN)_pCFXA_OttaCP_nanoluc | NBU2 | BUFFER Gate | SEQ ID |
| | | | LacI(ADR) | NO: 37 |
| pBH108 | RbsR(KSL)_pCFXA_OaggCP_nanoluc | NBU2 | BUFFER Gate | SEQ ID |
| | | | LacI(ADR) | NO: 38 |
| pBH109 | RbsR(HQN)_pCFXA_OttgCP_nanoluc | NBU2 | BUFFER Gate | SEQ ID |
| | | | LacI(ADR) | NO: 39 |
| pBH110 | RbsR(GKR)_pCFXA_OgacCP_nanoluc | NBU2 | BUFFER Gate | SEQ ID |
| | | | LacI(ADR) | NO: 40 |
| pBH111 | IA(9)(YQR)_pCFXA_O1CP_nanoluc | NBU2 | NOT Gate | SEQ ID |
| | | | IA(9)(ADR) | NO: 41 |
| pBH112 | IA(9)(TAN)_pCFXA_OttaCP_nanoluc | NBU2 | NOT Gate | SEQ ID |
| | | | IA(9)(ADR) | NO: 42 |
| pBH113 | IA(9)(KSL)_pCFXA_OaggCP_nanoluc | NBU2 | NOT Gate | SEQ ID |
| | | | IA(9)(ADR) | NO: 43 |
| pBH114 | IA(9)(HQN)_pCFXA_OttgCP_nanoluc | NBU2 | NOT Gate | SEQ ID |
| | | | IA(9)(ADR) | NO: 44 |
| pBH115 | IA(9)(GKR)_pCFXA_OgacCP_nanoluc | NBU2 | NOT Gate | SEQ ID |
| | | | IA(9)(ADR) | NO: 45 |
| pBH116 | RA(1)(YQR)_pCFXA_O1CP_nanoluc | NBU2 | NOT Gate | SEQ ID |
| | | | RA(1)(ADR) | NO: 46 |
| pBH117 | RA(1)(TAN)_pCFXA_OttaCP_nanoluc | NBU2 | NOT Gate | SEQ ID |
| | | | RA(1)(ADR) | NO: 47 |
| pBH118 | RA(1)(KSL)_pCFXA_OaggCP_nanoluc | NBU2 | NOT Gate | SEQ ID |
| | | | RA(1)(ADR) | NO: 48 |
| pBH119 | RA(1)(HQN)_pCFXA_OttgCP_nanoluc | NBU2 | NOT Gate | SEQ ID |
| | | | RA(1)(ADR) | NO: 49 |
| pBH120 | RA(1)(GKR)_pCFXA_OgacCP_nanoluc | NBU2 | NOT Gate | SEQ ID |
| | | | RA(1)(ADR) | NO: 50 |
| pBH201 | LacI(YQR)_RbsR(YQR)_pCFXA_O1CP_nanoluc | NBU2 | AND Gate | SEQ ID |
| | | | | NO: 51 |
| pBH202 | LacI(TAN)_RbsR(TAN)_pCFXA_OttaCP_nanoluc | NBU2 | AND Gate | SEQ ID |
| | | | | NO: 52 |
| pBH203 | LacI(KSL)_RbsR(KSL)_pCFXA_OaggCP_nanoluc | NBU2 | AND Gate | SEQ ID |
| | | | | NO: 53 |
| pBH204 | IA(9)(YQR)_RA(1)(YQR)_pCFXA_O1CP_nanoluc | NBU2 | NOR Gate | SEQ ID |
| | | | | NO: 54 |
| pBH205 | IA(9)(TAN)_RA(1)(TAN)_pCFXA_OttaCP_nanoluc | NBU2 | NOR Gate | SEQ ID |
| | | | | NO: 55 |
| pBH206 | IA(9)(KSL)_RA(1)(KSL)_pCFXA_OaggCP_nanoluc | NBU2 | NOR Gate | SEQ ID |
| | | | | NO: 56 |
| pBH207 | LacI(YQR)_RA(1)(YQR)_pCFXA_O1CP_nanoluc | NBU2 | I NIMPLY R | SEQ ID |
| | | | Gate | NO: 57 |
| pBH208 | LacI(TAN)_RA(1)(TAN)_pCFXA_OttaCP_nanoluc | NBU2 | I NIMPLY R | SEQ ID |
| | | | Gate | NO: 58 |
| pBH209 | LacI(KSL)_RA(1)(KSL)_pCFXA_OaggCP_nanoluc | NBU2 | I NIMPLY R | SEQ ID |
| | | | Gate | NO: 59 |
| pBH210 | IA(9)(YQR)_RbsR(YQR)_pCFXA_O1CP_nanoluc | NBU2 | R NIMPLY I | SEQ ID |
| | | | Gate | NO: 60 |
| pBH211 | IA(9)(TAN)_RbsR(TAN)_pCFXA_OttaCP_nanoluc | NBU2 | R NIMPLY I | SEQ ID |
| | | | Gate | NO: 61 |
| pBH212 | IA(9)(KSL)_RbsR(KSL)_pCFXA_OaggCP_nanoluc | NBU2 | R NIMPLY I | SEQ ID |
| | | | Gate | NO: 62 |
| pBH301 | IA(9)(YQR)_pCFXA_O1CP_RbsR(HQN)_pCFXA_OttgCP_nanoluc | NBU2 | OR Gate | SEQ ID |
| | | | | NO: 63 |
| pBH302 | RbsR(TAN)_pCFXA_ttaCP_IA(9)(HQN)_pCFXA_OttgCP_nanoluc | NBU2 | NAND Gate | SEQ ID |
| | | | | NO: 64 |
| pBH303 | LacI(YQR)_pCFXA_O1CP_RbsR(HQN)_pCFXA_OttgCP_nanoluc | NBU2 | I IMPLY R | SEQ ID |
| | | | Gate | NO: 65 |
| pBH304 | RbsR(TAN)_pCFXA_ttaCP_LacI(HQN)_pCFXA_OttgCP_nanoluc | NBU2 | R IMPLY I | SEQ ID |
| | | | Gate, partial | NO: 66 |
| | | | XNOR gate | |
| pBH305 | LacI(YQR)_pCFXA_O1CP_RbsR(HQN) | NBU1 | XNOR Gate | SEQ ID |
| | | | (partial) | NO: 67 |
| pBH306 | RbsR(TAN)_pCFXA_ttaCP_IA(9)(HQN) | NBU1 | XOR Gate | SEQ ID |
| | | | (partial) | NO: 68 |
| pBH401 | pCFXA_O1_nanoluc | NBU2 | Reporter gene | — |
| | | | for off- | |
| | | | diagonal | |
| | | | testing | |
| pBH402 | pCFXA_Otta_nanoluc | NBU2 | Reporter gene | — |
| | | | for off- | |
| | | | diagonal | |
| | | | testing | |
| pBH403 | pCFXA_Oagg_nanoluc | NBU2 | Reporter gene | — |
| | | | for off- | |
| | | | diagonal | |
| | | | testing | |
| pBH404 | pCFXA_Ottg_nanoluc | NBU2 | Reporter gene | — |
| | | | for off- | |
| | | | diagonal | |
| | | | testing | |
| pBH405 | pCFXA_Ogac_nanoluc | NBU2 | Reporter gene | — |
| | | | for off- | |
| | | | diagonal | |
| | | | testing | |
| pBH406 | LacI(YQR) | NBU1 | Single TF for | — |
| | | | off-diagonal | |
| | | | testing | |
| pBH407 | LacI(TAN) | NBU1 | Single TF for | — |
| | | | off-diagonal | |
| | | | testing | |
| pBH408 | LacI(KSL) | NBU1 | Single TF for | — |
| | | | off-diagonal | |
| | | | testing | |
| pBH409 | LacI(HQN) | NBU1 | Single TF for | — |
| | | | off-diagonal | |
| | | | testing | |
| pBH410 | LacI(GKR) | NBU1 | Single TF for | — |
| | | | off-diagonal | |
| | | | testing | |
| pBH411 | IA(9)(YQR) | NBU1 | Single TF for | — |
| | | | off-diagonal | |
| | | | testing | |
| pBH412 | IA(9)(TAN) | NBU1 | Single TF for | — |
| | | | off-diagonal | |
| | | | testing | |
| pBH413 | IA(9)(KSL) | NBU1 | Single TF for | — |
| | | | off-diagonal | |
| | | | testing | |
| pBH414 | IA(9)(HQN) | NBU1 | Single TF for | — |
| | | | off-diagonal | |
| | | | testing | |
| pBH415 | IA(9)(GKR) | NBU1 | Single TF for | — |
| | | | off-diagonal | |
| | | | testing | |
| pBH416 | RbsR(YQR) | NBU1 | Single TF for | — |
| | | | off-diagonal | |
| | | | testing | |
| pBH417 | RbsR(TAN) | NBU1 | Single TF for | — |
| | | | off-diagonal | |
| | | | testing | |
| pBH418 | RbsR(KSL) | NBU1 | Single TF for | — |
| | | | off-diagonal | |
| | | | testing | |
| pBH419 | RbsR(HQN) | NBU1 | Single TF for | — |
| | | | off-diagonal | |
| | | | testing | |
| pBH420 | RbsR(GKR) | NBU1 | Single TF for | — |
| | | | off-diagonal | |
| | | | testing | |
| pBH421 | RA(1)(YQR) | NBU1 | Single TF for | — |
| | | | off-diagonal | |
| | | | testing | |
| pBH422 | RA(1)(TAN) | NBU1 | Single TF for | — |
| | | | off-diagonal | |
| | | | testing | |
| pBH423 | RA(1)(KSL) | NBU1 | Single TF for | — |
| | | | off-diagonal | |
| | | | testing | |
| pBH424 | RA(1)(HQN) | NBU1 | Single TF for | — |
| | | | off-diagonal | |
| | | | testing | |
| pBH425 | RA(1)(GKR) | NBU1 | Single TF for | — |
| | | | off-diagonal | |
| | | | testing | |
| pBH501 | p1_dCas9 | NBU1 | Constitutive | SEQ ID |
| | | | dCas9 | NO: 69 |
| pBH502 | LacI(YQR)_pCFXA_O1CP_nano4sgRNA_pCFXA_nanoluc | NBU2 | LacI- | SEQ ID |
| | | | controlled | NO: 70 |
| | | | sgRNA for | |
| | | | nanoluc | |
| | | | knockdown | |
| pBH503 | IA(9)(YQR)_pCFXA_O1CP_nano4sgRNA_pCFXA_nanoluc | NBU2 | IA(9)- | SEQ ID |
| | | | controlled | NO: 71 |
| | | | sgRNA for | |
| | | | nanoluc | |
| | | | knockdown | |
| pBH504 | LacI(YQR)_pCFXA_O1CP_AmyC3sgRNA_p1_dCas9 | NBU1 | LacI- | SEQ ID |
| | | | controlled | NO: 72 |
| | | | sgRNA | |
| | | | for Bt | |
| | | | Amylopectin | |
| | | | susC | |
| | | | knockdown | |
| pBH505 | RbsR(YQR)_pCFXA_O1CP_AmyC3sgRNA_p1_dCas9 | NBU1 | RbsR- | SEQ ID |
| | | | controlled | NO: 73 |
| | | | sgRNA | |
| | | | for Bt | |
| | | | Amylopectin | |
| | | | susC | |
| | | | knockdown | |
| pBH506 | LacI(YQR)_pCFXA_O1CP_InuC4sgRNA_p1_dCas9 | NBU1 | LacI- | SEQ ID |
| | | | controlled | NO: 74 |
| | | | sgRNA for | |
| | | | Bo Inulin | |
| | | | susC | |
| | | | knockdown | |
| pBH507 | RbsR(YQR)_pCFXA_O1CP_InuC4sgRNA_p1_dCas9 | NBU1 | RbsR- | SEQ ID |
| | | | controlled | NO: 75 |
| | | | sgRNA for | |
| | | | Bo Inulin | |
| | | | susC | |
| | | | knockdown | |
| pBH508 | LacI(YQR)_pCFXA_O1CP_InuC6sgRNA_p1_dCas9 | NBU1 | LacI- | SEQ ID |
| | | | controlled | NO: 76 |
| | | | sgRNA | |
| | | | for Bu Inulin | |
| | | | susC | |
| | | | knockdown | |
| pBH509 | RbsR(YQR)_pCFXA_O1CP_InuC6sgRNA_p1_dCas9 | NBU1 | RbsR- | SEQ ID |
| | | | controlled | NO: 77 |
| | | | sgRNA | |
| | | | for Bu Inulin | |
| | | | susC | |
| | | | knockdown | |
| pBH510 | LacI(YQR)_RbsR(YQR)_pCFXA_O1CP_AmyC3sgRNA_p1_dCas9 | NBU2 | AND gate for | SEQ ID |
| | | | Bt | NO: 78 |
| | | | Amylopectin | |
| | | | susC | |
| | | | knockdown | |
| pBH511 | LacI(YQR)_RbsR(YQR)_pCFXA_O1CP_InuC6sgRNA_p1_dCas9 | NBU2 | AND gate for | SEQ ID |
| | | | Bu Inulin | NO: 79 |
| | | | susC | |
| | | | knockdown | |
| pBH512 | IA(9)(YQR)_RA(1)(YQR)_pCFXA_O1CP_InuC4sgRNA_p1_dCas9 | NBU1 | NOR gate for | SEQ ID |
| | | | Bo Inulin | NO: 80 |
| | | | susC | |
| | | | knockdown | |
| pBH513 | IA(9)(YQR)_pCFXA_O1CP_RbsR(HQN)_pCFXA_OttgCP_InuC4sgRNA_p1_dCas9 | NBU1 | OR gate for Bo | SEQ ID |
| | | | Inulin susC | NO: 81 |
| | | | knockdown | |

TABLE 2
Sequences of genetic components

| Name | Type | Sequence |
|---|---|---|
| LacI(YQR) | gene | gtgaaaccagtaacgttatacgatgtcgcagagtatgccggtgtctcttatcagaccgtttc |
| | | ccgcgtggtgaaccaggccagccacgtttctgcgaaaacgcgggaaaaagtggaagcg |
| | | gcgatggcggagctgaattacattcccaaccgcgtggcacaacaactggcgggcaaac |
| | | agtcgttgctgattggcgttgccacctccagtctggccctgcacgcgccgtcgcaaattgt |
| | | cgcggcgattaaatctcgcgccgatcaactgggtgccagcgtggtggtgtcgatggtaga |
| | | acgaagcggcgtcgaagcctgtaaaacggcggtgcacaatcttctcgcgcaacgcgtca |
| | | gtgggctgatcattaactatccgctggatgaccaggatgccattgctgtggaagctgcctg |
| | | cactaatgttccggcgttatttcttgatgtctctgaccagacacccatcaacagtattattttct |
| | | cccatgaagacggtacgcgactgggcgtggagcatctggtcgcattgggtcaccagcaa |
| | | atcgcgctgttagcgggcccattaagttctgtctcggcgcgtctgcgtctggctggctggc |
| | | ataaatatctcactcgcaatcaaattcagccgatagcggaacgggaaggcgactggagtg |
| | | ccatgtccggttttcaacaaaccatgcaaatgctgaatgagggcatcgttcccactgcgat |
| | | gctggttgccaacgatcagatggcgctgggcgcaatgcgcgccattaccgagtccgggc |
| | | tgcgcgttggtgcggatatctcggtagtgggatacgacgataccgaagacagctcatgtta |
| | | tatcccgccgttaaccaccatcaaacaggattttcgcctgctggggcaaaccagcgtgga |
| | | ccgcttgctgcaactctctcagggccaggcggtgaagggcaatcagctgttgcccgtctc |
| | | actggtgaaaagaaaaaccaccctggcgcccaatacgcaaaccgcctctccccgcgcgt |
| | | tggccgattcattaatgcagctggcacgacaggtttcccgactggaaagcgggcagtga |
| | | (SEQ ID NO: 1) |
| RbsR(YQR) | gene | gtgaaaccagtaacgttatacgatgtcgcagagtatgccggtgtctcttatcagaccgtttc |
| | | ccgcgtggtgaaccaggccagccacgtttctgcgaaaacgcgggaaaaagtggaagcg |
| | | gcgatggcggagctcaattacattcccaaccgcgtggcacaacaactggcgggcaaag |
| | | cgtcgcataccattggcatgttgatcactgccagtaccaatcctttctattcagaactggtgc |
| | | gtggcgttgaacgcagctgcttcgaacgcggttatagtctcgtcctttgcaataccgaagg |
| | | cgatgaacagcggatgaatcgcaatctggaaacgctgatgcaaaaacgcgttgatggctt |
| | | gctgttactgtgcaccgaaacgcatcaaccttcgcgtgaaatcatgcaacgttatccgaca |
| | | gtgcctactgtgatgatggactgggctccgttcgatggcgacagcgatcttattcaggata |
| | | actcgttgctgggcggagacttagcaacgcaatatctgatcgataaaggtcatacccgtat |
| | | cgcctgtattaccggcccgctggataaaactccggcgcgcctgcggttggaaggttatcg |
| | | ggcggcgatgaaacgtgcgggtctcaacattcctgatggctatgaagtcactggtgatttt |
| | | gaatttaacggcgggtttgacgctatgcgccaactgctatcacatccgctgcgtcctcagg |
| | | ccgtctttaccggaaatgacgctatggctgttggcgtttaccaggcgttatatcaggcagag |
| | | ttacaggttccgcaggatatcgcggtgattggctatgacgatatcgaactggcaagctttat |
| | | gacgccaccattaaccactatccaccaaccgaaagatgaactgggggagctggcgattg |
| | | atgtactcatccatcggataacccagccgacccttcagcaacaacgattacaacttactcc |
| | | gattctgatggaacgcggttcggcttagctggtgaaaagaaaaaccaccctggcgccca |
| | | atacgcaaaccgcctctccccgcgcgttggccgattcattaatgcagctggcacgacagg |
| | | tttcccgactggaaagcgggcagtga (SEQ ID NO: 2) |
| IA(9)(YQR) | gene | gtgaaaccagtaacgttatacgatgtcgcagagtatgccggtgtctcttatcagaccgtttc |
| | | ccgcgtggtgaaccaggccagccacgtttctgcgaaaacgcgggaaaaagtggaagcg |
| | | gcgatggcggagctgaattacattcccaaccgcgtggcacaacaactggcgggcaaac |
| | | agtcgttgctgattggcgttgccacctccagtctggccctgcacgcgctgtcgcaaattgtc |
| | | gcggcgattaaatctcgcgcctatcaactgggtgccagcgtgttcgtgtcgatggtagaac |
| | | gaagcggcatcgaagcctgtaaaacggcggtgcacaatcttctcgcgcaacgcgtcagt |
| | | gggctgatcattaactatccgctggataaccaggatgccattgctgtggaagctgcctgca |
| | | ctaatgttccggcgttatttcttgatgtctctgaccagacacccatcaacagtattattttctcc |
| | | catgaagacggtacgcgactgggcgtggagcatctggtcgcattgggtcaccagcaaat |
| | | cgcgctgttagcgggcccattaagttctgtctcggcgcgtctgcgtctggctggctggcat |
| | | aaatatctcactcgcaatcaaattcagccgatagcggaacgggaaggcgactggagtgc |
| | | catgtccggttttcaacaaaccatgcaaatgctgaatgagggcatcgttcccactgcgatg |
| | | ctggttgccaacgatcagatggcgctgggcgcaatgcgcgccattaccgagaccgggct |
| | | gcgcgttggtgcggatatctcggtagtgggatacgacgataccgaagacagctcatgttat |
| | | atcccgccgttaaccaccatcaaacaggattttcgcctgctggggcaaaccagcgtggac |
| | | cgcttgctgcaactctctcagggccaggcggtgaagggcaatcagctgttgcccgtctca |
| | | ctggtgaaaagaaaaaccaccctggcgcccaatacgcaaaccgcctctccccgcgcgtt |
| | | ggccgattcattaatgcagctggcacgacaggtttcccgactggaaagcgggcagtga |
| | | (SEQ ID NO: 3) |
| RA(1)(YQR) | gene | gtgaaaccagtaacgttatacgatgtcgcagagtatgccggtgtctcttatcagaccgtttc |
| | | ccgcgtggtgaaccaggccagccacgtttctgcgaaaacgcgggaaaaagtggaagcg |
| | | gcgatggcggagctcaattacattcccaaccgcgtggcacaacaactggcgggcaaag |
| | | cgtcgcataccattggcatgttgatcactgccagtaccaatcctttctattcagaactggtgc |
| | | gtggcgttgaacgcagctgcttcgaacgcggttatagtctcgatctttgcaataccgaagg |
| | | cgatgaacagcggatgaatcgcaatctggaaacgctgatgcaaaaacgcgttgatggctt |
| | | gctgttactgtgcaccgaaacgcatcaaccttcgcgtgaaatcatgcaacgttatccgaca |
| | | gtgcctactgtgatgatggactgggctccgttcgatggcgacagcgatcttattcaggata |
| | | actcgttgctgggcggagacttagcaacgcaatatctgatcgataaaggtcatacccgtat |
| | | cgcctgtattaccggcccgctggataaaactccggcgcgcctgcggttggaaggttatcg |
| | | ggcggcgatgaaacgtgcgggtctcaacattcctgatggctatgaagtcactggtgatttt |
| | | gaatttaacggcgggtttgacgctatgcgccaactgctatcacatccgctgcgtcctcagg |
| | | ccgtctttaccggaaatgacgctatggctgttggcgtttaccaggcgttatatcaggcagag |
| | | ttacaggttccgcaggatatcgcggtgattggctatgacgatatcgaactggcaagctttat |
| | | gacgccaccattaaccactatccaccaaccgaaagatgaactgggggagctggcgattg |
| | | atgtactcatccatcggataacccagccgacccttcagcaacaacgattacaacttactcc |
| | | gattctgatggaacgcggttcggcttagctggtgaaaagaaaaaccaccctggcgccca |
| | | atacgcaaaccgcctctccccgcgcgttggccgattcattaatgcagctggcacgacagg |
| | | tttcccgactggaaagcgggcagtga (SEQ ID NO: 4) |
| NanoLuc | gene | atggtttttactctggaagattttgttggcgattggcgtcagaccgcgggttataatttggatc |
| | | aagtcctggaacagggggcgtaagctctctgttccagaacctgggtgtgagcgtgacgc |
| | | cgattcagcgcatcgttctgtccggcgagaacggtctgaaaattgatattcatgtgatcatc |
| | | ccgtacgaaggcctgagcggtgaccaaatgggtcaaatcgagaaaatctttaaagtcgtc |
| | | tacccagttgacgatcaccacttcaaggttatcttgcattacggtacgctggtgattgatggt |
| | | gtgaccccgaatatgattgactatttcggccgtccgtatgaaggcattgccgtttttgacggt |
| | | aaaaagatcaccgtcaccggtaccctgtggaatggcaataagattattgacgagcgtctg |
| | | attaacccggacggcagcctgctgttccgcgtgaccatcaacggtgtcacgggttggcgt |
| | | ctgtgcgagcgcatcctggcataa (SEQ ID NO: 5) |
| dCas9 | gene | atggataagaaatactcaataggcttagctatcggcacaaatagcgtcggatgggcggtg |
| | | atcactgatgaatataaggttccgtctaaaaagttcaaggttctgggaaatacagaccgcc |
| | | acagtatcaaaaaaaatcttataggggctcttttatttgacagtggagagacagcggaagc |
| | | gactcgtctcaaacggacagctcgtagaaggtatacacgtcggaagaatcgtatttgttatc |
| | | tacaggagattttttcaaatgagatggcgaaagtagatgatagtttctttcatcgacttgaag |
| | | agtcttttttggtggaagaagacaagaagcatgaacgtcatcctatttttggaaatatagtag |
| | | atgaagttgcttatcatgagaaatatccaactatctatcatctgcgaaaaaaattggtagattc |
| | | tactgataaagcggatttgcgcttaatctatttggccttagcgcatatgattaagtttcgtggtc |
| | | attttttgattgagggagatttaaatcctgataatagtgatgtggacaaactatttatccagttg |
| | | gtacaaacctacaatcaattatttgaagaaaaccctattaacgcaagtggagtagatgctaa |
| | | agcgattctttctgcacgattgagtaaatcaagacgattagaaaatctcattgctcagctccc |
| | | cggtgagaagaaaaatggcttatttgggaatctcattgctttgtcattgggtttgacccctaat |
| | | tttaaatcaaattttgatttggcagaagatgctaaattacagctttcaaaagatacttacgatg |
| | | atgatttagataatttattggcgcaaattggagatcaatatgctgatttgtttttggcagctaag |
| | | aatttatcagatgctattttactttcagatatcctaagagtaaatactgaaataactaaggctcc |
| | | cctatcagcttcaatgattaaacgctacgatgaacatcatcaagacttgactcttttaaaagct |
| | | ttagttcgacaacaacttccagaaaagtataaagaaatcttttttgatcaatcaaaaaacgga |
| | | tatgcaggttatattgatgggggagctagccaagaagaattttataaatttatcaaaccaattt |
| | | tagaaaaaatggatggtactgaggaattattggtgaaactaaatcgtgaagatttgctgcgc |
| | | aagcaacggacctttgacaacggctctattccccatcaaattcacttgggtgagctgcatg |
| | | ctattttgagaagacaagaagacttttatccatttttaaaagacaatcgtgagaagattgaaa |
| | | aaatcttgacttttcgaattccttattatgttggtccattggcgcgtggcaatagtcgttttgcat |
| | | ggatgactcggaagtctgaagaaacaattaccccatggaattttgaagaagttgtcgataa |
| | | aggtgcttcagctcaatcatttattgaacgcatgacaaactttgataaaaatcttccaaatga |
| | | aaaagtactaccaaaacatagtttgctttatgagtattttacggtttataacgaattgacaaag |
| | | gtcaaatatgttactgaaggaatgcgaaaaccagcatttctttcaggtgaacagaagaaag |
| | | ccattgttgatttactcttcaaaacaaatcgaaaagtaaccgttaagcaattaaaagaagatt |
| | | atttcaaaaaaatagaatgttttgatagtgttgaaatttcaggagttgaagatagatttaatgct |
| | | tcattaggtacctaccatgatttgctaaaaattattaaagataaagattttttggataatgaaga |
| | | aaatgaagatatcttagaggatattgttttaacattgaccttatttgaagatagggagatgatt |
| | | gaggaaagacttaaaacatatgctcacctctttgatgataaggtgatgaaacagcttaaac |
| | | gtcgccgttatactggttggggacgtttgtctcgaaaattgattaatggtattagggataagc |
| | | aatctggcaaaacaatattagattttttgaaatcagatggttttgccaatcgcaattttatgcag |
| | | ctgatccatgatgatagtttgacatttaaagaagacattcaaaaagcacaagtgtctggaca |
| | | aggcgatagtttacatgaacatattgcaaatttagctggtagccctgctattaaaaaaggtat |
| | | tttacagactgtaaaagttgttgatgaattggtcaaagtaatggggggcataagccagaa |
| | | aatatcgttattgaaatggcacgtgaaaatcagacaactcaaaagggccagaaaaattcg |
| | | cgagagcgtatgaaacgaatcgaagaaggtatcaaagaattaggaagtcagattcttaaa |
| | | gagcatcctgttgaaaatactcaattgcaaaatgaaaagctctatctctattatctccaaaatg |
| | | gaagagacatgtatgtggaccaagaattagatattaatcgtttaagtgattatgatgtcgatg |
| | | ccattgttccacaaagtttccttaaagacgattcaatagacaataaggtcttaacgcgttctg |
| | | ataaaaatcgtggtaaatcggataacgttccaagtgaagaagtagtcaaaaagatgaaaa |
| | | actattggagacaacttctaaacgccaagttaatcactcaacgtaagtttgataatttaacga |
| | | aagctgaacgtggtggtttgagtgaacttgataaagctggttttatcaaacgccaattggttg |
| | | aaactcgccaaatcactaagcatgtggcacaaattttggatagtcgcatgaatactaaatac |
| | | gatgaaaatgataaacttattcgagaggttaaagtgattaccttaaaatctaaattagtttctg |
| | | acttccgaaaagatttccaattctataaagtacgtgagattaacaattaccatcatgcccatg |
| | | atgcgtatctaaatgccgtcgttggaactgctttgattaagaaatatccaaaacttgaatcgg |
| | | agtttgtctatggtgattataaagtttatgatgttcgtaaaatgattgctaagtctgagcaagaa |
| | | ataggcaaagcaaccgcaaaatatttcttttactctaatatcatgaacttcttcaaaacagaa |
| | | attacacttgcaaatggagagattcgcaaacgccctctaatcgaaactaatggggaaactg |
| | | gagaaattgtctgggataaagggcgagattttgccacagtgcgcaaagtattgtccatgcc |
| | | ccaagtcaatattgtcaagaaaacagaagtacagacaggcgaattctccaaggagtcaat |
| | | tttaccaaaaagaaattcggacaagcttattgctcgtaaaaaagactgggatccaaaaaaa |
| | | tatggtggttttgatagtccaacggtagcttattcagtcctagtggttgctaaggtggaaaaa |
| | | gggaaatcgaagaagttaaaatccgttaaagagttactagggatcacaattatggaaaga |
| | | agttcctttgaaaaaaatccgattgactttttagaagctaaaggatataaggaagttaaaaaa |
| | | gacttaatcattaaactacctaaatatagtctttttgagttagaaaacggtcgtaaacggatgc |
| | | tggctagtgccggagaattacaaaaaggaaatgagctggctctgccaagcaaatatgtga |
| | | attttttatatttagctagtcattatgaaaagttgaagggtagtccagaagataacgaacaaa |
| | | aacaattgtttgtggagcagcataagcattatttagatgagattattgagcaaatcagtgaatt |
| | | ttctaagcgtgttattttagcagatgccaatttagataaagttcttagtgcatataacaaacata |
| | | gagacaaaccaatacgtgaacaagcagaaaatattattcatttatttacgttgacgaatcttg |
| | | gagctcccgctgcttttaaatattttgatacaacaattgatcgtaaacgatatacgtctacaaa |
| | | agaagttttagatgccactcttatccatcaatccatcactggtctttatgaaacacgcattgatt |
| | | tgagtcagctaggaggtgactga (SEQ ID NO: 6) |
| PcfxA | promoter | atacaaagaaaattcgacaaactgttatttttctatctatttatttgggtgggaaactttagttat |
| | | gtacctttgtcggc (SEQ ID NO: 7) |
| P1 | promoter + | gataaagtttggaagataaagctaaaagttcttatctttgcagtccgaaataaagacatataa |
| | RBS | aagaaaagacacc (SEQ ID NO: 8) |
| PBT1311 | promoter + | tgatctggaagaagcaatgaaagctgctgttaagtctccgaatcaggtattgttcctgacag |
| | RBS | gtgtattcccatccggtaaacgcggatactttgcagttgatctgactcaggaataaattataa |
| | | attaaggtaagaagattgtaggataagctaatgaaatagaaaaaggatgccgtcacacaa |
| | | cttgtcggcattcttttttgttttattagttgaaaatatagtgaaaaagttgcctaaatatgtatgt |
| | | taacaaattatttgtcgtaactttgcactccaaatctgtttttaacatatggcacta (SEQ ID |
| | | NO: 9) |
| Pcfxa(O1) | promoter | tacaaagaaaattcgacaaactgttatttttctatctatttatttgaattgtgagcggataacaat |
| | | tacctttgtcggcaattgtgagcggataacaatt (SEQ ID NO: 10) |
| Pcfxa(Otta) | promoter | tacaaagaaaattcgacaaactgttatttttctatctatttatttgaattttaagcgcttaaaattta |
| | | cctttgtcggcaattttaagcgcttaaaatt (SEQ ID NO: 11) |
| Pcfxa(Ogac) | promoter | tacaaagaaaattcgacaaactgttatttttctatctatttatttgaattgacagcgctgtcaattt |
| | | acctttgtcggcaattgacagcgctgtcaatt (SEQ ID NO: 12) |
| Pcfxa(Ottg) | promoter | tacaaagaaaattcgacaaactgttatttttctatctatttatttgaattttgagcgctcaaaattt |
| | | acctttgtcggcaattttgagcgctcaaaatt (SEQ ID NO: 13) |
| Pcfxa(Oagg) | promoter | tacaaagaaaattcgacaaactgttatttttctatctatttatttgaattaggagcgctcctaattt |
| | | acctttgtcggcaattaggagcgctcctaatt (SEQ ID NO: 14) |
| Pcfxa(Osym) | promoter | tacaaagaaaattcgacaaactgttatttttctatctatttatttgaattgtgagcgctcacaattt |
| | | acctttgtcggcaattgtgagcgctcacaatt (SEQ ID NO: 15) |
| nano4 | sgRNA | gacagaacgatgcgctgaatgttttagagctagaaatagcaagttaaaataaggctagtcc |
| | | gttatcaacttgaaaaagtggcaccgagtcggtgctttttt (SEQ ID NO: 16) |
| BOinu4 | sgRNA | cctgacatcacattaccagtgttttagagctagaaatagcaagttaaaataaggctagtccg |
| | | ttatcaacttgaaaaagtggcaccgagtcggtgctttttt (SEQ ID NO: 17) |
| BUinu6 | sgRNA | gtcaactcaatgcgtaaagtgttttagagctagaaatagcaagttaaaataaggctagtccg |
| | | ttatcaacttgaaaaagtggcaccgagtcggtgctttttt (SEQ ID NO: 18) |
| BTamy3 | sgRNA | acaacattggcaccgataacgttttagagctagaaatagcaagttaaaataaggctagtcc |
| | | gttatcaacttgaaaaagtggcaccgagtcggtgctttttt (SEQ ID NO: 19) |
| HH | 5′ ribozyme | nnnnnnctgatgagtccgtgaggacgaaacgagtaagctcgtc |
| ribozyme | | (SEQ ID NO: 20) |
| ribozyme | 3′ ribozyme | ggccggcatggtcccagcctcctcgctggcgccggctgggcaacatgcttcggcatggc |
| | | gaatgggac (SEQ ID NO: 21) |
| nanoTerm | terminator | gcactctaatcgttatcggagtgcttttagattactaatcaaattgcttcta |
| | | (SEQ ID NO: 22) |
| L3S2P55 | terminator | ctcggtaccaaagacgaaCaataagacgctgaaaagcgtcttttttcgttttggtcc |
| | | (SEQ ID NO: 23) |
| L3S2P21 | terminator | ctcggtaccaaattccagaaaagaggcctcccgaaaggggggccttttttcgttttggtcc |
| | | (SEQ ID NO: 24) |
| TAN DBD | partial gene | gtgaaaccagtaacgttatacgatgtcgcagagtatgccggtgtctctaccgcgaccgttt |
| | | ccaac (SEQ ID NO: 25) |
| GKR DBD | partial gene | gtgaaaccagtaacgttatacgatgtcgcagagtatgccggtgtctctggaaagaccgttt |
| | | cccgc (SEQ ID NO: 26) |
| HQN DBD | partial gene | gtgaaaccagtaacgttatacgatgtcgcagagtatgccggtgtctctcatcagaccgtttc |
| | | caat (SEQ ID NO: 27) |
| KSL DBD | partial gene | gtgaaaccagtaacgttatacgatgtcgcagagtatgccggtgtctctaaaagcaccgtttc |
| | | cctg (SEQ ID NO: 28) |

a. For the HH ribozyme, the first 6 bp are the reverse complement of the 6 bp directly downstream of the ribozyme.
b. The DBD sequences include the first 22 residues of the gene, ending at the “R” of the “YQR” motif.

[0196] Unless defined otherwise, all technical and scientific terms used herein have the same meanings as commonly understood by one of skill in the art to which the disclosed invention belongs. Publications cited herein and the materials for which they are cited are specifically incorporated by reference.

[0197] Those skilled in the art will appreciate that numerous changes and modifications can be made to the preferred embodiments of the invention and that such changes and modifications can be made without departing from the spirit of the invention. It is, therefore, intended that the appended claims cover all such equivalent variations as fall within the true spirit and scope of the invention.

The application's sequence listing, which the Patent Office published only in electronic form, follows.

SEQUENCE LISTING (81 sequences)

SEQ ID NO: 1 - DNA, 1083 bp, Escherichia coli
  misc_feature 1..1083: note = Description of sequence: LacI(YQR) gene
  source 1..1083: mol_type = genomic DNA
gtgaaaccagtaacgttatacgatgtcgcagagtatgccggtgtctcttatcagaccgtttcccgcgtggtgaaccaggccagccacgtttctgcgaaaacgcgggaaaaagtggaagcggcgatggcggagctgaattacattcccaaccgcgtggcacaacaactggcgggcaaacagtcgttgctgattggcgttgccacctccagtctggccctgcacgcgccgtcgcaaattgtcgcggcgattaaatctcgcgccgatcaactgggtgccagcgtggtggtgtcgatggtagaacgaagcggcgtcgaagcctgtaaaacggcggtgcacaatcttctcgcgcaacgcgtcagtgggctgatcattaactatccgctggatgaccaggatgccattgctgtggaagctgcctgcactaatgttccggcgttatttcttgatgtctctgaccagacacccatcaacagtattattttctcccatgaagacggtacgcgactgggcgtggagcatctggtcgcattgggtcaccagcaaatcgcgctgttagcgggcccattaagttctgtctcggcgcgtctgcgtctggctggctggcataaatatctcactcgcaatcaaattcagccgatagcggaacgggaaggcgactggagtgccatgtccggttttcaacaaaccatgcaaatgctgaatgagggcatcgttcccactgcgatgctggttgccaacgatcagatggcgctgggcgcaatgcgcgccattaccgagtccgggctgcgcgttggtgcggatatctcggtagtgggatacgacgataccgaagacagctcatgttatatcccgccgttaaccaccatcaaacaggattttcgcctgctggggcaaaccagcgtggaccgcttgctgcaactctctcagggccaggcggtgaagggcaatcagctgttgcccgtctcactggtgaaaagaaaaaccaccctggcgcccaatacgcaaaccgcctctccccgcgcgttggccgattcattaatgcagctggcacgacaggtttcccgactggaaagcgggcagtga

SEQ ID NO: 2 - DNA, 1116 bp, Escherichia coli
  misc_feature 1..1116: note = Description of sequence: RbsR(YQR) gene
  source 1..1116: mol_type = genomic DNA
gtgaaaccagtaacgttatacgatgtcgcagagtatgccggtgtctcttatcagaccgtttcccgcgtggtgaaccaggccagccacgtttctgcgaaaacgcgggaaaaagtggaagcggcgatggcggagctcaattacattcccaaccgcgtggcacaacaactggcgggcaaagcgtcgcataccattggcatgttgatcactgccagtaccaatcctttctattcagaactggtgcgtggcgttgaacgcagctgcttcgaacgcggttatagtctcgtcctttgcaataccgaaggcgatgaacagcggatgaatcgcaatctggaaacgctgatgcaaaaacgcgttgatggcttgctgttactgtgcaccgaaacgcatcaaccttcgcgtgaaatcatgcaacgttatccgacagtgcctactgtgatgatggactgggctccgttcgatggcgacagcgatcttattcaggataactcgttgctgggcggagacttagcaacgcaatatctgatcgataaaggtcatacccgtatcgcctgtattaccggcccgctggataaaactccggcgcgcctgcggttggaaggttatcgggcggcgatgaaacgtgcgggtctcaacattcctgatggctatgaagtcactggtgattttgaatttaacggcgggtttgacgctatgcgccaactgctatcacatccgctgcgtcctcaggccgtctttaccggaaatgacgctatggctgttggcgtttaccaggcgttatatcaggcagagttacaggttccgcaggatatcgcggtgattggctatgacgatatcgaactggcaagctttatgacgccaccattaaccactatccaccaaccgaaagatgaactgggggagctggcgattgatgtactcatccatcggataacccagccgacccttcagcaacaacgattacaacttactccgattctgatggaacgcggttcggcttagctggtgaaaagaaaaaccaccctggcgcccaatacgcaaaccgcctctccccgcgcgttggccgattcattaatgcagctggcacgacaggtttcccgactggaaagcgggcagtga

SEQ ID NO: 3 - DNA, 1083 bp, Escherichia coli
  misc_feature 1..1083: note = Description of sequence: IA(9)(YQR) gene
  source 1..1083: mol_type = genomic DNA
gtgaaaccagtaacgttatacgatgtcgcagagtatgccggtgtctcttatcagaccgtttcccgcgtggtgaaccaggccagccacgtttctgcgaaaacgcgggaaaaagtggaagcggcgatggcggagctgaattacattcccaaccgcgtggcacaacaactggcgggcaaacagtcgttgctgattggcgttgccacctccagtctggccctgcacgcgctgtcgcaaattgtcgcggcgattaaatctcgcgcctatcaactgggtgccagcgtgttcgtgtcgatggtagaacgaagcggcatcgaagcctgtaaaacggcggtgcacaatcttctcgcgcaacgcgtcagtgggctgatcattaactatccgctggataaccaggatgccattgctgtggaagctgcctgcactaatgttccggcgttatttcttgatgtctctgaccagacacccatcaacagtattattttctcccatgaagacggtacgcgactgggcgtggagcatctggtcgcattgggtcaccagcaaatcgcgctgttagcgggcccattaagttctgtctcggcgcgtctgcgtctggctggctggcataaatatctcactcgcaatcaaattcagccgatagcggaacgggaaggcgactggagtgccatgtccggttttcaacaaaccatgcaaatgctgaatgagggcatcgttcccactgcgatgctggttgccaacgatcagatggcgctgggcgcaatgcgcgccattaccgagaccgggctgcgcgttggtgcggatatctcggtagtgggatacgacgataccgaagacagctcatgttatatcccgccgttaaccaccatcaaacaggattttcgcctgctggggcaaaccagcgtggaccgcttgctgcaactctctcagggccaggcggtgaagggcaatcagctgttgcccgtctcactggtgaaaagaaaaaccaccctggcgcccaatacgcaaaccgcctctccccgcgcgttggccgattcattaatgcagctggcacgacaggtttcccgactggaaagcgggcagtga

SEQ ID NO: 4 - DNA, 1116 bp, Escherichia coli
  misc_feature 1..1116: note = Description of sequence: RA(1)(YQR) gene
  source 1..1116: mol_type = genomic DNA
gtgaaaccagtaacgttatacgatgtcgcagagtatgccggtgtctcttatcagaccgtttcccgcgtggtgaaccaggccagccacgtttctgcgaaaacgcgggaaaaagtggaagcggcgatggcggagctcaattacattcccaaccgcgtggcacaacaactggcgggcaaagcgtcgcataccattggcatgttgatcactgccagtaccaatcctttctattcagaactggtgcgtggcgttgaacgcagctgcttcgaacgcggttatagtctcgatctttgcaataccgaaggcgatgaacagcggatgaatcgcaatctggaaacgctgatgcaaaaacgcgttgatggcttgctgttactgtgcaccgaaacgcatcaaccttcgcgtgaaatcatgcaacgttatccgacagtgcctactgtgatgatggactgggctccgttcgatggcgacagcgatcttattcaggataactcgttgctgggcggagacttagcaacgcaatatctgatcgataaaggtcatacccgtatcgcctgtattaccggcccgctggataaaactccggcgcgcctgcggttggaaggttatcgggcggcgatgaaacgtgcgggtctcaacattcctgatggctatgaagtcactggtgattttgaatttaacggcgggtttgacgctatgcgccaactgctatcacatccgctgcgtcctcaggccgtctttaccggaaatgacgctatggctgttggcgtttaccaggcgttatatcaggcagagttacaggttccgcaggatatcgcggtgattggctatgacgatatcgaactggcaagctttatgacgccaccattaaccactatccaccaaccgaaagatgaactgggggagctggcgattgatgtactcatccatcggataacccagccgacccttcagcaacaacgattacaacttactccgattctgatggaacgcggttcggcttagctggtgaaaagaaaaaccaccctggcgcccaatacgcaaaccgcctctccccgcgcgttggccgattcattaatgcagctggcacgacaggtttcccgactggaaagcgggcagtga

SEQ ID NO: 5 - DNA, 516 bp, Oplophorus gracilirostris
  misc_feature 1..516: note = Description of sequence: NanoLuc
  source 1..516: mol_type = genomic DNA
atggtttttactctggaagattttgttggcgattggcgtcagaccgcgggttataatttggatcaagtcctggaacagggtggcgtaagctctctgttccagaacctgggtgtgagcgtgacgccgattcagcgcatcgttctgtccggcgagaacggtctgaaaattgatattcatgtgatcatcccgtacgaaggcctgagcggtgaccaaatgggtcaaatcgagaaaatctttaaagtcgtctacccagttgacgatcaccacttcaaggttatcttgcattacggtacgctggtgattgatggtgtgaccccgaatatgattgactatttcggccgtccgtatgaaggcattgccgtttttgacggtaaaaagatcaccgtcaccggtaccctgtggaatggcaataagattattgacgagcgtctgattaacccggacggcagcctgctgttccgcgtgaccatcaacggtgtcacgggttggcgtctgtgcgagcgcatcctggcataa

SEQ ID NO: 6 - DNA, 4107 bp, synthetic construct
  misc_feature 1..4107: note = Description of sequence: dCAs9
  source 1..4107: mol_type = other DNA
atggataagaaatactcaataggcttagctatcggcacaaatagcgtcggatgggcggtgatcactgatgaatataaggttccgtctaaaaagttcaaggttctgggaaatacagaccgccacagtatcaaaaaaaatcttataggggctcttttatttgacagtggagagacagcggaagcgactcgtctcaaacggacagctcgtagaaggtatacacgtcggaagaatcgtatttgttatctacaggagattttttcaaatgagatggcgaaagtagatgatagtttctttcatcgacttgaagagtcttttttggtggaagaagacaagaagcatgaacgtcatcctatttttggaaatatagtagatgaagttgcttatcatgagaaatatccaactatctatcatctgcgaaaaaaattggtagattctactgataaagcggatttgcgcttaatctatttggccttagcgcatatgattaagtttcgtggtcattttttgattgagggagatttaaatcctgataatagtgatgtggacaaactatttatccagttggtacaaacctacaatcaattatttgaagaaaaccctattaacgcaagtggagtagatgctaaagcgattctttctgcacgattgagtaaatcaagacgattagaaaatctcattgctcagctccccggtgagaagaaaaatggcttatttgggaatctcattgctttgtcattgggtttgacccctaattttaaatcaaattttgatttggcagaagatgctaaattacagctttcaaaagatacttacgatgatgatttagataatttattggcgcaaattggagatcaatatgctgatttgtttttggcagctaagaatttatcagatgctattttactttcagatatcctaagagtaaatactgaaataactaaggctcccctatcagcttcaatgattaaacgctacgatgaacatcatcaagacttgactcttttaaaagctttagttcgacaacaacttccagaaaagtataaagaaatcttttttgatcaatcaaaaaacggatatgcaggttatattgatgggggagctagccaagaagaattttataaatttatcaaaccaattttagaaaaaatggatggtactgaggaattattggtgaaactaaatcgtgaagatttgctgcgcaagcaacggacctttgacaacggctctattccccatcaaattcacttgggtgagctgcatgctattttgagaagacaagaagacttttatccatttttaaaagacaatcgtgagaagattgaaaaaatcttgacttttcgaattccttattatgttggtccattggcgcgtggcaatagtcgttttgcatggatgactcggaagtctgaagaaacaattaccccatggaattttgaagaagttgtcgataaaggtgcttcagctcaatcatttattgaacgcatgacaaactttgataaaaatcttccaaatgaaaaagtactaccaaaacatagtttgctttatgagtattttacggtttataacgaattgacaaaggtcaaatatgttactgaaggaatgcgaaaaccagcatttctttcaggtgaacagaagaaagccattgttgatttactcttcaaaacaaatcgaaaagtaaccgttaagcaattaaaagaagattatttcaaaaaaatagaatgttttgatagtgttgaaatttcaggagttgaagatagatttaatgcttcattaggtacctaccatgatttgctaaaaattattaaagataaagattttttggataatgaagaaaatgaagatatcttagaggatattgttttaacattgaccttatttgaagatagggagatgattgaggaaagacttaaaacatatgctcacctctttgatgataaggtgatgaaacagcttaaacgtcgccgttatactggttggggacgtttgtctcgaaaattgattaatggtattagggataagcaatctggcaaaacaatattagattttttgaaatcagatggttttgccaatcgcaattttatgcagctgatccatgatgatagtttgacatttaaagaagacattcaaaaagcacaagtgtctggacaaggcgatagtttacatgaacatattgcaaatttagctggtagccctgctattaaaaaaggtattttacagactgtaaaagttgttgatgaattggtcaaagtaatggggcggcataagccagaaaatatcgttattgaaatggcacgtgaaaatcagacaactcaaaagggccagaaaaattcgcgagagcgtatgaaacgaatcgaagaaggtatcaaagaattaggaagtcagattcttaaagagcatcctgttgaaaatactcaattgcaaaatgaaaagctctatctctattatctccaaaatggaagagacatgtatgtggaccaagaattagatattaatcgtttaagtgattatgatgtcgatgccattgttccacaaagtttccttaaagacgattcaatagacaataaggtcttaacgcgttctgataaaaatcgtggtaaatcggataacgttccaagtgaagaagtagtcaaaaagatgaaaaactattggagacaacttctaaacgccaagttaatcactcaacgtaagtttgataatttaacgaaagctgaacgtggtggtttgagtgaacttgataaagctggttttatcaaacgccaattggttgaaactcgccaaatcactaagcatgtggcacaaattttggatagtcgcatgaatactaaatacgatgaaaatgataaacttattcgagaggttaaagtgattaccttaaaatctaaattagtttctgacttccgaaaagatttccaattctataaagtacgtgagattaacaattaccatcatgcccatgatgcgtatctaaatgccgtcgttggaactgctttgattaagaaatatccaaaacttgaatcggagtttgtctatggtgattataaagtttatgatgttcgtaaaatgattgctaagtctgagcaagaaataggcaaagcaaccgcaaaatatttcttttactctaatatcatgaacttcttcaaaacagaaattacacttgcaaatggagagattcgcaaacgccctctaatcgaaactaatggggaaactggagaaattgtctgggataaagggcgagattttgccacagtgcgcaaagtattgtccatgccccaagtcaatattgtcaagaaaacagaagtacagacaggcgaattctccaaggagtcaattttaccaaaaagaaattcggacaagcttattgctcgtaaaaaagactgggatccaaaaaaatatggtggttttgatagtccaacggtagcttattcagtcctagtggttgctaaggtggaaaaagggaaatcgaagaagttaaaatccgttaaagagttactagggatcacaattatggaaagaagttcctttgaaaaaaatccgattgactttttagaagctaaaggatataaggaagttaaaaaagacttaatcattaaactacctaaatatagtctttttgagttagaaaacggtcgtaaacggatgctggctagtgccggagaattacaaaaaggaaatgagctggctctgccaagcaaatatgtgaattttttatatttagctagtcattatgaaaagttgaagggtagtccagaagataacgaacaaaaacaattgtttgtggagcagcataagcattatttagatgagattattgagcaaatcagtgaattttctaagcgtgttattttagcagatgccaatttagataaagttcttagtgcatataacaaacatagagacaaaccaatacgtgaacaagcagaaaatattattcatttatttacgttgacgaatcttggagctcccgctgcttttaaatattttgatacaacaattgatcgtaaacgatatacgtctacaaaagaagttttagatgccactcttatccatcaatccatcactggtctttatgaaacacgcattgatttgagtcagctaggaggtgactga

SEQ ID NO: 7 - DNA, 80 bp, Bacteroides thetaiotaomicron
  misc_feature 1..80: note = Description of sequence: PcfxA promoter
  source 1..80: mol_type = genomic DNA
ttacaaagaaaattcgacaaactgttatttttctatctatttatttgggtgggaaactttagttatgtacctttgtcggc

SEQ ID NO: 8 - DNA, 76 bp, Bacteroides thetaiotaomicron
  misc_feature 1..76: note = Description of sequence: P1 promoter + RBS
  source 1..76: mol_type = genomic DNA
gataaagtttggaagataaagctaaaagttcttatctttgcagtccgaaataaagacatataaaagaaaagacacc

SEQ ID NO: 9 - DNA, 309 bp, Bacteroides thetaiotaomicron
  misc_feature 1..309: note = Description of sequence: PBT1311 promoter + RBS
  source 1..309: mol_type = genomic DNA
tgatctggaagaagcaatgaaagctgctgttaagtctccgaatcaggtattgttcctgacaggtgtattcccatccggtaaacgcggatactttgcagttgatctgactcaggaataaattataaattaaggtaagaagattgtaggataagctaatgaaatagaaaaaggatgccgtcacacaacttgtcggcattcttttttgttttattagttgaaaatatagtgaaaaagttgcctaaatatgtatgttaacaaattatttgtcgtaactttgcactccaaatctgtttttaacatatggcacta

SEQ ID NO: 10 - DNA, 100 bp, Bacteroides thetaiotaomicron
  misc_feature 1..100: note = Description of sequence: Pcfxa(O1) promoter
  source 1..100: mol_type = genomic DNA
tacaaagaaaattcgacaaactgttatttttctatctatttatttgaattgtgagcggataacaattacctttgtcggcaattgtgagcggataacaatt

SEQ ID NO: 11 - DNA, 99 bp, Bacteroides thetaiotaomicron
  misc_feature 1..99: note = Description of sequence: Pcfxa(Otta) promoter
  source 1..99: mol_type = genomic DNA
tacaaagaaaattcgacaaactgttatttttctatctatttatttgaattttaagcgcttaaaatttacctttgtcggcaattttaagcgcttaaaatt

SEQ ID NO: 12 - DNA, 99 bp, Bacteroides thetaiotaomicron
  misc_feature 1..99: note = Description of sequence: Pcfxa(Ogac) promoter
  source 1..99: mol_type = genomic DNA
tacaaagaaaattcgacaaactgttatttttctatctatttatttgaattgacagcgctgtcaatttacctttgtcggcaattgacagcgctgtcaatt

SEQ ID NO: 13 - DNA, 99 bp, Bacteroides thetaiotaomicron
  misc_feature 1..99: note = Description of sequence: Pcfxa(Ottg) promoter
  source 1..99: mol_type = genomic DNA
tacaaagaaaattcgacaaactgttatttttctatctatttatttgaattttgagcgctcaaaatttacctttgtcggcaattttgagcgctcaaaatt

SEQ ID NO: 14 - DNA, 99 bp, Bacteroides thetaiotaomicron
  misc_feature 1..99: note = Description of sequence: Pcfxa(Oagg) promoter
  source 1..99: mol_type = genomic DNA
tacaaagaaaattcgacaaactgttatttttctatctatttatttgaattaggagcgctcctaatttacctttgtcggcaattaggagcgctcctaatt

SEQ ID NO: 15 - DNA, 99 bp, Bacteroides thetaiotaomicron
  misc_feature 1..99: note = Description of sequence: Pcfxa(Osym) promoter
  source 1..99: mol_type = genomic DNA
tacaaagaaaattcgacaaactgttatttttctatctatttatttgaattgtgagcgctcacaatttacctttgtcggcaattgtgagcgctcacaatt

SEQ ID NO: 16 - DNA, 102 bp, synthetic construct
  misc_feature 1..102: note = Description of sequence: nano4 sgRNA
  source 1..102: mol_type = other DNA
gacagaacgatgcgctgaatgttttagagctagaaatagcaagttaaaataaggctagtccgttatcaacttgaaaaagtggcaccgagtcggtgctttttt

SEQ ID NO: 17 - DNA, 102 bp, synthetic construct
  misc_feature 1..102: note = Description of sequence: BOinu4 sgRNA
  source 1..102: mol_type = other DNA
cctgacatcacattaccagtgttttagagctagaaatagcaagttaaaataaggctagtccgttatcaacttgaaaaagtggcaccgagtcggtgctttttt

SEQ ID NO: 18 - DNA, 102 bp, synthetic construct
  misc_feature 1..102: note = Description of sequence: BUinu6 sgRNA
  source 1..102: mol_type = other DNA
gtcaactcaatgcgtaaagtgttttagagctagaaatagcaagttaaaataaggctagtccgttatcaacttgaaaaagtggcaccgagtcggtgctttttt

SEQ ID NO: 19 - DNA, 102 bp, synthetic construct
  misc_feature 1..102: note = Description of sequence: BTamy3 sgRNA
  source 1..102: mol_type = other DNA
acaacattggcaccgataacgttttagagctagaaatagcaagttaaaataaggctagtccgttatcaacttgaaaaagtggcaccgagtcggtgctttttt

SEQ ID NO: 20 - DNA, 43 bp, synthetic construct
  misc_feature 1..43: note = Description of sequence: HH ribozyme 5' ribozyme
  source 1..43: mol_type = other DNA
nnnnnnctgatgagtccgtgaggacgaaacgagtaagctcgtc

SEQ ID NO: 21 - DNA, 68 bp, Hepatitus delta virus
  misc_feature 1..68: note = Description of sequence: ribozyme 3' ribozyme
  source 1..68: mol_type = genomic DNA
ggccggcatggtcccagcctcctcgctggcgccggctgggcaacatgcttcggcatggcgaatgggac

SEQ ID NO: 22 - DNA, 52 bp, synthetic construct
  misc_feature 1..52: note = Description of sequence: nanoTerm terminator
  source 1..52: mol_type = other DNA
gcactctaatcgttatcggagtgcttttagattactaatcaaattgcttcta

SEQ ID NO: 23 - DNA, 57 bp, synthetic construct
  misc_feature 1..57: note = Description of sequence: L3S2P55 terminator
  source 1..57: mol_type = other DNA
ctcggtaccaaagacgaacaataagacgctgaaaagcgtcttttttcgttttggtcc

SEQ ID NO: 24 - DNA, 61 bp, synthetic construct
  misc_feature 1..61: note = Description of sequence: L3S2P21 terminator
  source 1..61: mol_type = other DNA
ctcggtaccaaattccagaaaagaggcctcccgaaaggggggccttttttcgttttggtcc

SEQ ID NO: 25 - DNA, 66 bp, synthetic construct
  misc_feature 1..66: note = Description of sequence: TAN DBD partial gene
  source 1..66: mol_type = other DNA
gtgaaaccagtaacgttatacgatgtcgcagagtatgccggtgtctctaccgcgaccgtttccaac

SEQ ID NO: 26 - DNA, 66 bp, synthetic construct
  misc_feature 1..66: note = Description of sequence: GKR DBD partial gene
  source 1..66: mol_type = other DNA
gtgaaaccagtaacgttatacgatgtcgcagagtatgccggtgtctctggaaagaccgtttcccgc

SEQ ID NO: 27 - DNA, 66 bp, synthetic construct
  misc_feature 1..66: note = Description of sequence: HQN DBD partial gene
  source 1..66: mol_type = other DNA
gtgaaaccagtaacgttatacgatgtcgcagagtatgccggtgtctctcatcagaccgtttccaat

SEQ ID NO: 28 - DNA, 66 bp, synthetic construct
  misc_feature 1..66: note = Description of sequence: KSL DBD partial gene
  source 1..66: mol_type = other DNA
gtgaaaccagtaacgttatacgatgtcgcagagtatgccggtgtctctaaaagcaccgtttccctg

SEQ ID NO: 29 - DNA, 5222 bp, synthetic construct
  misc_feature 1..5222: note = Description of sequence: pBH001
  source 1..5222: mol_type = other DNA
gtttaacggttgtggacaacaagccagggatgtaacgcactgagaagcccttagagcctctcaaagcaattttgagtgacacaggaacacttaacggctgacatgggaattcccctccaccgcggtggcccttgagacggcatcttccatctacactttatgcttccggctcgtatgttgtgtggaattgtgagcggataacaatttcacacaggaaacagctatgaccatgattacgccaagcttgcatgcctgcaggtcgactctagaggatccccgggtaccgagctcgaattcactggccgtcgttttacaacgtcgtgactgggaaaaccctggcgttacccaacttaatcgccttgcagcacatccccctttcgccagctggcgtaatagcgaagaggcccgcaccgatcgcccttcccaacagttgcgcagcctgaatggcgaatggcgcctgatgcggtattttctccttacgcatctgtgcggtatttcacaccgcatatggtgcactctcagtacaatctgctctgatgccgcataggatctgatgcatcgtctcaccgatacttgtgcctgttctatttccgaaccgaccgcttgtatgaatccatcaaaattcgttttctctatgttggattccttgttgctcatattgtgatgataatttctacaaatatagtcattggtaactatctatgaaactgtttgatacttttatagttgattaaacttgttcatggcatttgccttaatatcatccgctatgtcaatgtagggtttcatagctttgtagtcgctgtgtcccgtccatttcatgaccacctgtgccgggattccgagagccagcgcattgcagatgaatgtccttcttcctgcatgggtactgagcaaagcgtatttgggtgtgacttcatcaatacgttcatttcccttgtagtaggtttcccgtacaggctcgttgatttctgccagttcgcccagctctttcaggtaatcgttcatcttctggttgctgatgacgggcagagccatgtaattctcgaaatggatgtccttgtatttgtccagtatggctttgctgtatttgttcagttcaatcgtcaggctgtcggcagtcttgactgtggttatttcgatgtggtcggacttcacatcgcttcttttcagattgcgaacatccgaataccgcaaactcgtaaagcagcagaacaggaaaacatcacgcacacgttccaggtattgcttatccttgggtatctggtagtctttcagcttgttcagttcatcccaagtcaggaagattacttttttcgaggtggttttcagtttcggtttgaacgtatcgtatgcaatgttctgatgatgtcctttcctgaagctccagcgcaggaaccatttgaggaatcccatttgcttgccgatggtgctgtttctcatatccttggtgtcacgcaggaagttgacgtattcgttcaatccaaactcgttgaaatagttgaacgttgcatcctccttgaactctttgaggtggttcctcactgctgcaaatttttcataggtggatgccgtccagttattctggttaccgcactcttttacaaactcatcgaacacctcccaaaagctgacaggggcttcttccggctgttcttcactggtgtctttcattctcatgttgaaagcttccttcaactgttgggtcgttggcatgacctcctgcacctcaaattccttgaaaatattctggatttcggcatagtatttcagcaagtccgtattgatttcggctgcactttgctttagcttgttggtacatccgttctttacccgctgcttatctacatcccatttggctacgtcaatccggtagcccgttgtaaactcgatacgttggctggcaaagatgacacgcatacggatgggtacgttctctacgattggcacaccgttctttttccggctctccaatgcaaaaatgatgttgcgcttgatattcataattgggtgcgtttgaaattctacacccaaatatacacccaattattgagatagcaaaagacatttagaaacatttacttttactctatattgtaatttacacttgattatcagtcgtttgcagttttatgatattctgtgaaagtataagttcgagagcctgtctctccgcaaaaaacgctgaaaatcagcagattgcaaaacaaacaccctgttttacacccaagaatgtaaagtcggctgtttttgttttatttaagataatacaaccactacataataaaagagtagcgatattaaaagaatccgatgagaaaagactaatatttatctatccattcagtttgatttttcaggactttacatcgtcctgaaagtatttgttggtaccggtaccgaggacgcgtaaacatttacagttgcatgtggcctattgtttttagccgttaaatattttataactattaaatagcgatacaaattgttcgaaactaatattgtttatatcatatattctcgcatgttttaaagctttattaaattgattttttgtaaacagtttttcgtactctttgttaacccatttcattacaaaagtttcatatttttttctctctttaaatgccatttttgctggctttctttttaatacaattaatgtgctatccactttaggttttggatggaaataatacctaggaatttttgctaatatagaaatatctacctctgccattaacagcaatgctagtgatctgtttgtatctaataacattttagcaaaaccatattccactattaaataacttattgtggctgaactttcaaaaacaatttttcgaattatatttgtgcttatgttgtaaggtatgctgccaaatattttatatggattgtggctaggaaatgtaaatttcagtatatcatcatttactatttgatagttaggataatttaagagcttattacgagttacctcacataatttagaatcaatttctatcgccgttacaaaattacatctctttaccaatccagcagtaaaatgacctttccctgcacctatttcaaagatgttatctttttcatctaaacttatgcaattcattattttttctatgtgatattttgaagtaataaaattttgactatcttttatatttactttgttcattataacctctccttaatttattgcatctcttttcgaatatttatgttttttgagaaaagaacgtactcatggttcatcccgatatgcgtatcggtctgtatatcagcaactttctatgtgtttcaactacaatagtcatctattctcatctttctgagtccaccccctgcaaagcccctctttacgacataaaaattcggtcggaaaaggtatgcaaaagatgtttctctctttaagagaaactcttcgggatgcaaaaatatgaaaataactccaattcaccaaattatatagcgacttttttacaaaatgctaaaatttgttgatttccgtcaagcaattgttgagcaaaaatgtcttttacgataaaatgatacctcaatatcaactgtttagcaaaacgatatttctcttaaagagagaaacacctttttgttcaccaatccccgacttttaatcccgcggccatgattgaaaaaggaagagtatgagtattcaacatttccgtgtcgcccttattcccttttttgcggcattttgccttcctgtttttgctcacccagaaacgctggtgaaagtaaaagatgctgaagatcagttgggtgcacgagtgggttacatcgaactggatctcaacagcggtaagatccttgagagttttcgccccgaagaacgttttccaatgatgagcacttttaaagttctgctatgtggcgcggtattatcccgtattgacgccgggcaagagcaactcggtcgccgcatacactattctcagaatgacttggttgagtactcaccagtcacagaaaagcatcttacggatggcatgacagtaagagaattatgcagtgctgccataaccatgagtgataacactgcggccaacttacttctgacaacgatcggaggaccgaaggagctaaccgcttttttgcacaacatgggggatcatgtaactcgccttgatcgttgggaaccggagctgaatgaagccataccaaacgacgagcgtgacaccacgatgcctgtagcaatggcaacaacgttgcgcaaactattaactggcgaactacttactctagcttcccggcaacaattaatagactggatggaggcggataaagttgcaggaccacttctgcgctcggcccttccggctggctggtttattgctgataaatctggagccggtgagcgtgggtctcgcggtatcattgcagcactggggccagatggtaagccctcccgtatcgtagttatctacacgacggggagtcaggcaactatggatgaacgaaatagacagatcgctgagataggtgcctcactgattaagcattggtaactgtcagaccaagtttactcataacgcgtcaattcgagggggatcaattccgtgataggtgggctgcccttcctggttggcttggtttcatcagccatccgcttgccctcatctgttacgccggcggtagccggccagcctcgcagagcaggattcccgttgagcaccgccaggtgcgaataagggacagtgaagaaggaacacccgctcgcgggtgggcctacttcacctatcctgcccggctgacgccgttggatacaccaaggaaagtctacacgaaccctttggcaaaatcctgtatatcgtgcgaaaaaggatggatataccgaaaaaatcgctataatgaccccgaagcagggttatgcagcggaaaacggaattgatccggccacgatgcgtccggcgtagaggatctgaagatcagcagttcaacctgttgatagtacgtactaagctctcatgtttcacgtactaagctctcatgtttaacgtactaagctctcatgtttaacgaactaaaccctcatggctaacgtactaagctctcatggctaacgtactaagctctcatgtttcacgtactaagctctcatgtttgaacaataaaattaatataaatcagcaacttaaatagcctctaaggttttaagttttataagaaaaaaaagaatatataaggcttttaaagcttttaag

SEQ ID NO: 30 - DNA, 7173 bp, synthetic construct
  misc_feature 1..7173: note = Description of sequence: pBH002
  source 1..7173: mol_type = other DNA
gatgtaacgcactgagaagcccttagagcctctcaaagcaattttgagtgacacaggaacacttaacggctgacatgggaattcccctccaccgcggtgtattaatgcggctgccccttgagacggcatcttccatctacactttatgcttccggctcgtatgttgtgtggaattgtgagcggataacaatttcacacaggaaacagctatgaccatgattacgccaagcttgcatgcctgcaggtcgactctagaggatccccgggtaccgagctcgaattcactggccgtcgttttacaacgtcgtgactgggaaaaccctggcgttacccaacttaatcgccttgcagcacatccccctttcgccagctggcgtaatagcgaagaggcccgcaccgatcgcccttcccaacagttgcgcagcctgaatggcgaatggcgcctgatgcggtattttctccttacgcatctgtgcggtatttcacaccgcatatggtgcactctcagtacaatctgctctgatgccgcataggatctgatgcatcgtctcaccgataattgcctatcttccagtgatggaacagcatttgtgcattggctgcaacaatcagccttacttgtgcctgttctatttccgaaccgaccgcttgtatgaatgcatcaaaattcgttttctctacgttggattccttgttgctcatattgtgatgataatttctacaaatatagtcattggtaactatctatgaaactgtttgatacttttatcagtctaatagttttacaaggtctttcttcatttcttcgtcaatatccctgtatcgtctgaaagctttgcttccctccttgtgtcccgacagtgcggaaacaaggttcgggtctttcacttttttatagatattgccgataaacgtacgtcttgccagatggctgcttgccacttcataaataggtcgtttgatttcgttgtgcgtcaacgggtctaagattgttacgatgcggtcaactccagctaatttgaatatcttttttatggcatcattgtacttttgctcggatatgaacggcaacagttttccctcatattctttgtagcgttcaaggatttctttcgctttgtcgttaagtggaacacgtaccgtaaccggattcccctctttggttttcttgggaatatattctatggcttcattgaccacatttagtttggtcattcggtacaggtcgctcaccctgcatcctatcagtgtctgaaatatgaatatatccctctgtattgccagttgtggggtggcagaaaggtctgcattaaaaatcctgtccctttcttcgagtgttatataataaggtgtaccatatgtacactcctctatcggaaacttgtcgaaaggtctgtttgtggtgcgtttgttatcgaagcaccacaggaagaatgtgcgtattcttgaaaaacagtctatcagcgtgtttttgcttctgggctgtggtgtcctcttttcgggaatggcttcataaatgctcgggtaaagttcataatactggtattcgttctgaaagaaatcccacatatcccgaagcgtgtcaggtgttaccaaatccacatcaaggataaagcccttttgtcctctctttgtagcccttacatatagttcataacgcagtaaggctcttttgacaacccggaaatttttctttcgtacttccgacaaagggtgcttgtttagaaattcatcgaatagttctccaatggtaggcttgataaccacttcctccggcaaaaaatatttttcaggatggtaaaatttatcaagtgttgtttttagccattctttgtctattgcttccttttcttgttgatataccttctcgatataggttttcaactggcgtatctcttcatttatatgggtacgcatttcttcattgcagacagctttcgtttttacacattcgtctttatcatcccatagattgggattgatggctaactgagtaggagcaacggagtctaactgccttccgtttctaaaacggacatagattgtagccatggattctgtatcatatcgtttggctgcttttttaatgataaaggttactttcatagactttcaggttgaattttactctgctgcaaatataaatattttccccagcattttccccacatctgctaaatattttgcaattcgattaaacttggattaaaatttaataggattataacatattgaaatacagtgtaattgtggcgtttttccgcatttttctttttacccacattttccccactttaattatttcaaatgcggggtctgggtacaagaaagaaagctaagtatttgatagttcaatacttagctttttcttttgcttgaattttccccacattttccccacacgtgcaaaaaatatagcagtaagtcattatttcttttggttgaacgtagagagtagcgatattaaaagaatccgatgagaaaagactaatatttatctatccattcagtttgatttttcaggactttacatcgtcctgaaagtatttgttggtaccggtaccgaggacgcgtaaacatttacagttgcatgtggcctattgtttaggacgcgttatctccttaacgtacgttttcgttccattggccctcaaaccccgttatatacattcatgtccatttatgtaaaaaatcctgctgaccttgtttatgtcttgtcagtcaccatttgcaaaaccatatttgaccctcaaagaggctgaatttgataagcaacttgctacatactcataataaggagctaaatagaacacgaatgggaaatactcaaatgccaaactaaagaagatattggccaaaataaacgctataccgagagagaaacttgatttttcaacttcctaaccaacagtgttgttcaaacatttctacttatttgtacttaccagttgaacctacgtttccctaataaaatgtctatggtaaaaagttaaaaaatcctcctacttttgttagatatatttttttgtgtaattttgtaatcgttatgcggcagtaataatatacatattaatacgagttaggaatcctgtagttctcatatgctacgaggaggtattaaaaggtgcgtttcgacaatgcatctattgtagtatattattgcttaatccaaatgaatattataaatttaggaattcttgctcacattgatgcaggaaaaacttccgtaaccgagaatctgctgtttgccagtggagcaacggaaaagtgcggctgtgtggataatggtgacaccataacggactctatggatatagagaaacgtagaggaattactgttcgggcttctacgacatctattatctggaatggtgtgaaatgcaatatcattgacactccgggacacatggattttattgcggaagtggagcggacattcaaaatgcttgatggagcagtcctcatcttatccgcaaaggaaggcatacaagcgcagacaaagttgctgttcaatactttacagaagctgcaaatcccgacaattatatttatcaataagattgaccgagccggtgtgaatttggagcgtttgtatctggatataaaagcaaatctgtctcaagatgtcctgtttatgcaaaatgttgtcgatggatcggtttatccggtttgctcccaaacatatataaaggaagaatacaaagaatttgtatgcaaccatgacgacaatatattagaacgatatttggcggatagcgaaatttcaccggctgattattggaatacgataatcgctcttgtggcaaaagccaaagtctatccggtgctacatggatcagcaatgttcaatatcggtatcaatgagttgttggacgccatcacttcttttatacttcctccggcatcggtctcaaacagactttcatcttatctttataagatagagcatgaccccaaaggacataaaagaagttttctaaaaataattgacggaagtctgagacttcgagacgttgtaagaatcaacgattcggaaaaattcatcaagattaaaaatctaaaaactatcaatcagggcagagagataaatgttgatgaagtgggcgccaatgatatcgcgattgtagaggatatggatgattttcgaatcggaaattatttaggtgctgaaccttgtttgattcaaggattatcgcatcagcatcccgctctcaaatcctccgtccggccagacaggcccgaagagagaagcaaggtgatatccgctctgaatacattgtggattgaagacccgtctttgtccttttccataaactcatatagtgatgaattggaaatctcgttatatggtttaacccaaaaggaaatcatacagacattgctggaagaacgattttccgtaaaggtccattttgatgagatcaagactatatacaaagaacgacctgtaaaaaaggtcaataagattattcagatcgaagtgccgcccaacccttattgggccacaatagggctgactcttgaacccttaccgttagggacagggttgcaaatcgaaagtgacatctcctatggttatctgaaccattcttttcaaaatgccgtttttgaagggattcgtatgtcttgccaatccgggttacatggatgggaagtgactgatctgaaagtaacttttactcaagccgagtattatagcccggtaagtacacctgctgatttcagacagctgaccccttatgtcttcaggctggccttgcaacagtcaggtgtggacattctcgaaccgatgctctattttgagttgcagataccccaagcggcaagttccaaagctattacagatttgcaaaaaatgatgtctgagattgaagacatcagttgcaataatgagtggtgtcatattaaagggaaagttccattaaatacaagtaaagactatgcatcagaagtaagttcatacactaagggcttaggcatttttatggttaagccatgcgggtatcaaataacaaaaggcggttattctgataatatccgcatgaacgaaaaagataaacttttattcatgttccaaaaatcaatgtcatcaaaataatggtataacctctccttaatttattgcatctcttttcgaatatttatgttttttgagaaaagaacgtactcatggttcatcccgatatgcgtatcggtctgtatatcagcaactttctatgtgtttcaactacaatagtcatctattctcatctttctgagtccaccccctgcaaagcccctctttacgacataaaaattcggtcggaaaaggtatgcaaaagatgtttctctctttaagagaaactcttcgggatgcaaaaatatgaaaataactccaattcaccaaattatatagcgacttttttacaaaatgctaaaatttgttgatttccgtcaagcaattgttgagcaaaaatgtcttttacgataaaatgatacctcaatatcaactgtttagcaaaacgatatttctcttaaagagagaaacacctttttgttcaccaatccccgacttttaatcccgcggccatgattgaaaaaggaagagtatgagtattcaacatttccgtgtcgcccttattcccttttttgcggcattttgccttcctgtttttgctcacccagaaacgctggtgaaagtaaaagatgctgaagatcagttgggtgcacgagtgggttacatcgaactggatctcaacagcggtaagatccttgagagttttcgccccgaagaacgttttccaatgatgagcacttttaaagttctgctatgtggcgcggtattatcccgtattgacgccgggcaagagcaactcggtcgccgcatacactattctcagaatgacttggttgagtactcaccagtcacagaaaagcatcttacggatggcatgacagtaagagaattatgcagtgctgccataaccatgagtgataacactgcggccaacttacttctgacaacgatcggaggaccgaaggagctaaccgcttttttgcacaacatgggggatcatgtaactcgccttgatcgttgggaaccggagctgaatgaagccataccaaacgacgagcgtgacaccacgatgcctgtagcaatggcaacaacgttgcgcaaactattaactggcgaactacttactctagcttcccggcaacaattaatagactggatggaggcggataaagttgcaggaccacttctgcgctcggcccttccggctggctggtttattgctgataaatctggagccggtgagcgtgggtcacgcggtatcattgcagcactggggccagatggtaagccctcccgtatcgtagttatctacacgacggggagtcaggcaactatggatgaacgaaatagacagatcgctgagataggtgcctcactgattaagcattggtaactgtcagaccaagtttactcataacgcgtcaattcgagggggatcaattccgtgataggtgggctgcccttcctggttggcttggtttcatcagccatccgcttgccctcatctgttacgccggcggtagccggccagcctcgcagagcaggattcccgttgagcaccgccaggtgcgaataagggacagtgaagaaggaacacccgctcgcgggtgggcctacttcacctatcctgcccggctgacgccgttggatacaccaaggaaagtctacacgaaccctttggcaaaatcctgtatatcgtgcgaaaaaggatggatataccgaaaaaatcgctataatgaccccgaagcagggttatgcagcggaaaacggaattgatccggccacgatgcgtccggcgtagaggatctgaagatcagcagttcaacctgttgatagtacgtactaagctctcatgtttcacgtactaagctctcatgtttaacgtactaagctctcatgtttaacgaactaaaccctcatggctaacgtactaagctctcatggctaacgtactaagctctcatgtttcacgtactaagctctcatgtttgaacaataaaattaatataaatcagcaacttaaatagcctctaaggttttaagttttataagaaaaaaaagaatatataaggcttttaaagcttttaaggtttaacggttgtggacaacaagccagg

SEQ ID NO: 31 - DNA, 7052 bp, synthetic construct
  misc_feature 1..7052: note = Description of sequence: Pbh101
  source 1..7052: mol_type = other DNA
gtttaacggttgtggacaacaagccagggatgtaacgcactgagaagcccttagagcctctcaaagcaattttgagtgacacaggaacacttaacggctgacatgggaattcccctccaccgcggtggtacaaagaaaattcgacaaactgttatttttctatctatttatttgaattgtgagcggataacaattacctttgtcggcaattgtgagcggataacaattaaataaagatattctcgtcaaacaaatataaataatataaacatggtttttactctggaagattttgttggcgattggcgtcagaccgcgggttataatttggatcaagtcctggaacagggtggcgtaagctctctgttccagaacctgggtgtgagcgtgacgccgattcagcgcatcgttctgtccggcgagaacggtctgaaaattgatattcatgtgatcatcccgtacgaaggcctgagcggtgaccaaatgggtcaaatcgagaaaatctttaaagtcgtctacccagttgacgatcaccacttcaaggttatcttgcattacggtacgctggtgattgatggtgtgaccccgaatatgattgactatttcggccgtccgtatgaaggcattgccgtttttgacggtaaaaagatcaccgtcaccggtaccctgtggaatggcaataagattattgacgagcgtctgattaacccggacggcagcctgctgttccgcgtgaccatcaacggtgtcacgggttggcgtctgtgcgagcgcatcctggcataatgaactgcacttgctttgataattaatgataaacaatctaaaagcactctaatcgttatcggagtgcttttagattactaatcaaattgcttctactaattgcctatcttccagtgatggaacagcatttgtgcattggctgcaacaatcagccttgatctggaagaagcaatgaaagctgctgttaagtctccgaatcaggtattgttcctgacaggtgtattcccatccggtaaacgcggatactttgcagttgatctgactcaggaataaattataaattaaggtaagaagattgtaggataagctaatgaaatagaaaaaggatgccgtcacacaacttgtcggcattcttttttgttttattagttgaaaatatagtgaaaaagttgcctaaatatgtatgttaacaaattatttgtcgtaactttgcactccaaatctgtttttaacatatggcactagtgaaaccagtaacgttatacgatgtcgcagagtatgccggtgtctcttatcagaccgtttcccgcgtggtgaaccaggccagccacgtttctgcgaaaacgcgggaaaaagtggaagcggcgatggcggagctgaattacattcccaaccgcgtggcacaacaactggcgggcaaacagtcgttgctgattggcgttgccacctccagtctggccctgcacgcgccgtcgcaaattgtcgcggcgattaaatctcgcgccgatcaactgggtgccagcgtggtggtgtcgatggtagaacgaagcggcgtcgaagcctgtaaaacggcggtgcacaatcttctcgcgcaacgcgtcagtgggctgatcattaactatccgctggatgaccaggatgccattgctgtggaagctgcctgcactaatgttccggcgttatttcttgatgtctctgaccagacacccatcaacagtattattttctcccatgaagacggtacgcgactgggcgtggagcatctggtcgcattgggtcaccagcaaatcgcgctgttagcgggcccattaagttctgtctcggcgcgtctgcgtctggctggctggcataaatatctcactcgcaatcaaattcagccgatagcggaacgggaaggcgactggagtgccatgtccggttttcaacaaaccatgcaaatgctgaatgagggcatcgttcccactgcgatgctggttgccaacgatcagatggcgctgggcgcaatgcgcgccattaccgagtccgggctgcgcgttggtgcggatatctcggtagtgggatacgacgataccgaagacagctcatgttatatcccgccgttaaccaccatcaaacaggattttcgcctgctggggcaaaccagcgtggaccgcttgctgcaactctctcagggccaggcggtgaagggcaatcagctgttgcccgtctcactggtgaaaagaaaaaccaccctggcgcccaatacgcaaaccgcctctccccgcgcgttggccgattcattaatgcagctggcacgacaggtttcccgactggaaagcgggcagtgagctttcctcggtaccaaattccagaaaagaggcctcccgaaaggggggccttttttcgttttggtcctacttgtgcctgttctatttccgaaccgaccgcttgtatgaatccatcaaaattcgttttctctatgttggattccttgttgctcatattgtgatgataatttctacaaatatagtcattggtaactatctatgaaactgtttgatacttttatagttgattaaacttgttcatggcatttgccttaatatcatccgctatgtcaatgtagggtttcatagctttgtagtcgctgtgtcccgtccatttcatgaccacctgtgccgggattccgagagccagcgcattgcagatgaatgtccttcttcctgcatgggtactgagcaaagcgtatttgggtgtgacttcatcaatacgttcatttcccttgtagtaggtttcccgtacaggctcgttgatttctgccagttcgcccagctctttcaggtaatcgttcatcttctggttgctgatgacgggcagagccatgtaattctcgaaatggatgtccttgtatttgtccagtatggctttgctgtatttgttcagttcaatcgtcaggctgtcggcagtcttgactgtggttatttcgatgtggtcggacttcacatcgcttcttttcagattgcgaacatccgaataccgcaaactcgtaaagcagcagaacaggaaaacatcacgcacacgttccaggtattgcttatccttgggtatctggtagtctttcagcttgttcagttcatcccaagtcaggaagattacttttttcgaggtggttttcagtttcggtttgaacgtatcgtatgcaatgttctgatgatgtcctttcttgaagctccagcgcaggaaccatttgaggaatcccatttgcttgccgatggtgctgtttctcatatccttggtgtcacgcaggaagttgacgtattcgttcaatccaaactcgttgaaatagttgaacgttgcatcctccttgaactctttgaggtggttcctcactgctgcaaatttttcataggtggatgccgtccagttattctggttaccgcactcttttacaaactcatcgaacacctcccaaaagctgacaggggcttcttccggctgttcttcgctggtgtctttcattctcatgttgaaagcttccttcaactgttgggtcgttggcatgacctcctgcacctcaaattccttgaaaatattctggatttcggcatagtatttcagcaagtccgtattgatttcggctgcactttgctttagcttgttggtacatccgctctttacccgctgcttatctgcatcccatttggctacgtcaatccggtagcccgttgtaaactcgatgcgttggctggcaaagatgacacgcatacggatgggtacgttctctacgattggcacaccgttctttttccggctctccaatgcaaaaatgatgttgcgcttgatattcataattgggtgcgtttgaaattctacacccaaatatacacccaattattgagatagcaaaagacatttagaaacatttacttttactctatattgtaatttacacttgattatcagtcgtttgcagtcttatgatattctgtgaaagtataagttcgagagcctgtctctccgcaaaaaacgctgaaaatcagcagattgcaaaacaaacaccctgttttacacccaagaatgtaaagtcggctgtttttgttttatttaagataatacaaccactacataataaaagagtagcgatattaaaagaatccgatgagaaaagactaatatttatctatccattcagtttgatttttcaggactttacatcgtcctgaaagtatttgttggtaccggtaccgaggacgcgtaaacatttacagttgcatgtggcctattgtttttagccgttaaatattttataactattaaatagcgatacaaattgttcgaaactaatattgtttatatcatatattctcgcatgttttaaagctttattaaattgattttttgtaaacagtttttcgtactctttgttaacccatttcattacaaaagtttcatatttttttctctctttaaatgccatttttgctggctttctttttaatacaattaatgtgctatccactttaggttttggatggaaataatacctaggaatttttgctaatatagaaatatctacctctgccattaacagcaatgctagtgatctgtttgtatctaataacattttagcaaaaccatattccactattaaataacttattgtggctgaactttcaaaaacaatttttcgaattatatttgtgcttatgttgtaaggtatgctgccaaatattttatatggattgtggctaggaaatgtaaatttcagtatatcatcatttactatttgatagttaggataatttaagagcttattacgagttacctcacataatttagaatcaatttctatcgccgttacaaaattacatctctttaccaatccagcagtaaaatgacctttccctgcacctatttcaaagatgttatctttttcatctaaacttatgcaattcattattttttctatgtgatattttgaagtaataaaattttgactatcttttatatttactttgttcattataacctctccttaatttattgcatctcttttcgaatatttatgttttttgagaaaagaacgtactcatggttcatcccgatatgcgtatcggtctgtatatcagcaactttctatgtgtttcaactacaatagtcatctattctcatctttctgagtccaccccctgcaaagcccctctttacgacataaaaattcggtcggaaaaggtatgcaaaagatgtttctctctttaagagaaactcttcgggatgcaaaaatatgaaaataactccaattcaccaaattatatagcgacttttttacaaaatgctaaaatttgttgatttccgtcaagcaattgttgagcaaaaatgtcttttacgataaaatgatacctcaatatcaactgtttagcaaaacgatatttctcttaaagagagaaacacctttttgttcaccaatccccgacttttaatcccgcggccatgattgaaaaaggaagagtatgagtattcaacatttccgtgtcgcccttattcccttttttgcggcattttgccttcctgtttttgctcacccagaaacgctggtgaaagtaaaagatgctgaagatcagttgggtgcacgagtgggttacatcgaactggatctcaacagcggtaagatccttgagagttttcgccccgaagaacgttttccaatgatgagcacttttaaagttctgctatgtggcgcggtattatcccgtattgacgccgggcaagagcaactcggtcgccgcatacactattctcagaatgacttggttgagtactcaccagtcacagaaaagcatcttacggatggcatgacagtaagagaattatgcagtgctgccataaccatgagtgataacactgcggccaacttacttctgacaacgatcggaggaccgaaggagctaaccgcttttttgcacaacatgggggatcatgtaactcgccttgatcgttgggaaccggagctgaatgaagccataccaaacgacgagcgtgacaccacgatgcctgtagcaatggcaacaacgttgcgcaaactattaactggcgaactacttactctagcttcccggcaacaattaatagactggatggaggcggataaagttgcaggaccacttctgcgctcggcccttccggctggctggtttattgctgataaatctggagccggtgagcgtgggtctcgcggtatcattgcagcactggggccagatggtaagccctcccgtatcgtagttatctacacgacggggagtcaggcaactatggatgaacgaaatagacagatcgctgagataggtgcctcactgattaagcattggtaactgtcagaccaagtttactcataacgcgtcaattcgagggggatcaattccgtgataggtgggctgcccttcctggttggcttggtttcatcagccatccgcttgccctcatctgttacgccggcggtagccggccagcctcgcagagcaggattcccgttgagcaccgccaggtgcgaataagggacagtgaagaaggaacacccgctcgcgggtgggcctacttcacctatcctgcccggctgacgccgttggatacaccaaggaaagtctacacgaaccctttggcaaaatcctgtatatcgtgcgaaaaaggatggatataccgaaaaaatcgctataatgaccccgaagcagggttatgcagcggaaaacggaattgatccggccacgatgcgtccggcgtagaggatctgaagatcagcagttcaacctgttgatagtacgtactaagctctcatgtttcacgtactaagctctcatgtttaacgtactaagctctcatgtttaacgaactaaaccctcatggctaacgtactaagctctcatggctaacgtactaagctctcatgtttcacgtactaagctctcatgtttgaacaataaaattaatataaatcagcaacttaaatagcctctaaggttttaagttttataagaaaaaaaagaatatataaggcttttaaagcttttaag

SEQ ID NO: 32 - DNA, 7051 bp, synthetic construct
  misc_feature 1..7051: note = Description of sequence: pBH102
  source 1..7051: mol_type = other DNA
gtttaacggttgtggacaacaagccagggatgtaacgcactgagaagcccttagagcctctcaaagcaattttgagtgacacaggaacacttaacggctgacatgggaattcccctccaccgcggtggtacaaagaaaattcgacaaactgttatttttctatctatttatttgaattttaagcgcttaaaatttacctttgtcggcaattttaagcgcttaaaattaaataaagatattctcgtcaaacaaatataaataatataaacatggtttttactctggaagattttgttggcgattggcgtcagaccgcgggttataatttggatcaagtcctggaacagggtggcgtaagctctctgttccagaacctgggtgtgagcgtgacgccgattcagcgcatcgttctgtccggcgagaacggtctgaaaattgatattcatgtgatcatcccgtacgaaggcctgagcggtgaccaaatgggtcaaatcgagaaaatctttaaagtcgtctacccagttgacgatcaccacttcaaggttatcttgcattacggtacgctggtgattgatggtgtgaccccgaatatgattgactatttcggccgtccgtatgaaggcattgccgtttttgacggtaaaaagatcaccgtcaccggtaccctgtggaatggcaataagattattgacgagcgtctgattaacccggacggcagcctgctgttccgcgtgaccatcaacggtgtcacgggttggcgtctgtgcgagcgcatcctggcataatgaactgcacttgctttgataattaatgataaacaatctaaaagcactctaatcgttatcggagtgcttttagattactaatcaaattgcttctactaattgcctatcttccagtgatggaacagcatttgtgcattggctgcaacaatcagccttgatctggaagaagcaatgaaagctgctgttaagtctccgaatcaggtattgttcctgacaggtgtattcccatccggtaaacgcggatactttgcagttgatctgactcaggaataaattataaattaaggtaagaagattgtaggataagctaatgaaatagaaaaaggatgccgtcacacaacttgtcggcattcttttttgttttattagttgaaaatatagtgaaaaagttgcctaaatatgtatgttaacaaattatttgtcgtaactttgcactccaaatctgtttttaacatatggcactagtgaaaccagtaacgttatacgatgtcgcagagtatgccggtgtctctaccgcgaccgtttccaacgtggtgaaccaggccagccacgtttctgcgaaaacgcgggaaaaagtggaagcggcgatggcggagctgaattacattcccaaccgcgtggcacaacaactggcgggcaaacagtcgttgctgattggcgttgccacctccagtctggccctgcacgcgccgtcgcaaattgtcgcggcgattaaatctcgcgccgatcaactgggtgccagcgtggtggtgtcgatggtagaacgaagcggcgtcgaagcctgtaaaacggcggtgcacaatcttctcgcgcaacgcgtcagtgggctgatcattaactatccgctggatgaccaggatgccattgctgtggaagctgcctgcactaatgttccggcgttatttcttgatgtctctgaccagacacccatcaacagtattattttctcccatgaagacggtacgcgactgggcgtggagcatctggtcgcattgggtcaccagcaaatcgcgctgttagcgggcccattaagttctgtctcggcgcgtctgcgtctggctggctggcataaatatctcactcgcaatcaaattcagccgatagcggaacgggaaggcgactggagtgccatgtccggttttcaacaaaccatgcaaatgctgaatgagggcatcgttcccactgcgatgctggttgccaacgatcagatggcgctgggcgcaatgcgcgccattaccgagtccgggctgcgcgttggtgcggatatctcggtagtgggatacgacgataccgaagacagctcatgttatatcccgccgttaaccaccatcaaacaggattttcgcctgctggggcaaaccagcgtggaccgcttgctgcaactctctcagggccaggcggtgaagggcaatcagctgttgcccgtctcactggtgaaaagaaaaaccaccctggcgcccaatacgcaaaccgcctctccccgcgcgttggccgattcattaatgcagctggcacgacaggtttcccgactggaaagcgggcagtgagctttcctcggtaccaaattccagaaaagaggcctcccgaaaggggggccttttttcgttttggtcctacttgtgcctgttctatttccgaaccgaccgcttgtatgaatccatcaaaattcgttttctctatgttggattccttgttgctcatattgtgatgataatttctacaaatatagtcattggtaactatctatgaaactgtttgatacttttatagttgattaaacttgttcatggcatttgccttaatatcatccgctatgtcaatgtagggtttcatagctttgtagtcgctgtgtcccgtccatttcatgaccacctgtgccgggattccgagagccagcgcattgcagatgaatgtccttcttcctgcatgggtactgagcaaagcgtatttgggtgtgacttcatcaatacgttcatttcccttgtagtaggtttcccgtacaggctcgttgatttctgccagttcgcccagctctttcaggtaatcgttcatcttctggttgctgatgacgggcagagccatgtaattctcgaaatggatgtccttgtatttgtccagtatggctttgctgtatttgttcagttcaatcgtcaggctgtcggcagtcttgactgtggttatttcgatgtggtcggacttcacatcgcttcttttcagattgcgaacatccgaataccgcaaactcgtaaagcagcagaacaggaaaacatcacgcacacgttccaggtattgcttatccttgggtatctggtagtctttcagcttgttcagttcatcccaagtcaggaagattacttttttcgaggtggttttcagtttcggtttgaacgtatcgtatgcaatgttctgatgatgtcctttcttgaagctccagcgcaggaaccatttgaggaatcccatttgcttgccgatggtgctgtttctcatatccttggtgtcacgcaggaagttgacgtattcgttcaatccaaactcgttgaaatagttgaacgttgcatcctccttgaactctttgaggtggttcctcactgctgcaaatttttcataggtggatgccgtccagttattctggttaccgcactcttttacaaactcatcgaacacctcccaaaagctgacaggggcttcttccggctgttcttcgctggtgtctttcattctcatgttgaaagcttccttcaactgttgggtcgttggcatgacctcctgcacctcaaattccttgaaaatattctggatttcggcatagtatttcagcaagtccgtattgatttcggctgcactttgctttagcttgttggtacatccgctctttacccgctgcttatctgcatcccatttggctacgtcaatccggtagcccgttgtaaactcgatgcgttggctggcaaagatgacacgcatacggatgggtacgttctctacgattggcacaccgttctttttccggctctccaatgcaaaaatgatgttgcgcttgatattcataattgggtgcgtttgaaattctacacccaaatatacacccaattattgagatagcaaaagacatttagaaacatttacttttactctatattgtaatttacacttgattatcagtcgtttgcagtcttatgatattctgtgaaagtataagttcgagagcctgtctctccgcaaaaaacgctgaaaatcagcagattgcaaaacaaacaccctgttttacacccaagaatgtaaagtcggctgtttttgttttatttaagataatacaaccactacataataaaagagtagcgatattaaaagaatccgatgagaaaagactaatatttatctatccattcagtttgatttttcaggactttacatcgtcctgaaagtatttgttggtaccggtaccgaggacgcgtaaacatttacagttgcatgtggcctattgtttttagccgttaaatattttataactattaaatagcgatacaaattgttcgaaactaatattgtttatatcatatattctcgcatgttttaaagctttattaaattgattttttgtaaacagtttttcgtactctttgttaacccatttcattacaaaagtttcatatttttttctctctttaaatgccatttttgctggctttctttttaatacaattaatgtgctatccactttaggttttggatggaaataatacctaggaatttttgctaatatagaaatatctacctctgccattaacagcaatgctagtgatctgtttgtatctaataacattttagcaaaaccatattccactattaaataacttattgtggctgaactttcaaaaacaatttttcgaattatatttgtgcttatgttgtaaggtatgctgccaaatattttatatggattgtggctaggaaatgtaaatttcagtatatcatcatttactatttgatagttaggataatttaagagcttattacgagttacctcacataatttagaatcaatttctatcgccgttacaaaattacatctctttaccaatccagcagtaaaatgacctttccctgcacctatttcaaagatgttatctttttcatctaaacttatgcaattcattattttttctatgtgatattttgaagtaataaaattttgactatcttttatatttactttgttcattataacctctccttaatttattgcatctcttttcgaatatttatgttttttgagaaaagaacgtactcatggttcatcccgatatgcgtatcggtctgtatatcagcaactttctatgtgtttcaactacaatagtcatctattctcatctttctgagtccaccccctgcaaagcccctctttacgacataaaaattcggtcggaaaaggtatgcaaaagatgtttctctctttaagagaaactcttcgggatgcaaaaatatgaaaataactccaattcaccaaattatatagcgacttttttacaaaatgctaaaatttgttgatttccgtcaagcaattgttgagcaaaaatgtcttttacgataaaatgatacctcaatatcaactgtttagcaaaacgatatttctcttaaagagagaaacacctttttgttcaccaatccccgacttttaatcccgcggccatgattgaaaaaggaagagtatgagtattcaacatttccgtgtcgcccttattcccttttttgcggcattttgccttcctgtttttgctcacccagaaacgctggtgaaagtaaaagatgctgaagatcagttgggtgcacgagtgggttacatcgaactggatctcaacagcggtaagatccttgagagttttcgccccgaagaacgttttccaatgatgagcacttttaaagttctgctatgtggcgcggtattatcccgtattgacgccgggcaagagcaactcggtcgccgcatacactattctcagaatgacttggttgagtactcaccagtcacagaaaagcatcttacggatggcatgacagtaagagaattatgcagtgctgccataaccatgagtgataacactgcggccaacttacttctgacaacgatcggaggaccgaaggagctaaccgcttttttgcacaacatgggggatcatgtaactcgccttgatcgttgggaaccggagctgaatgaagccataccaaacgacgagcgtgacaccacgatgcctgtagcaatggcaacaacgttgcgcaaactattaactggcgaactacttactctagcttcccggcaacaattaatagactggatggaggcggataaagttgcaggaccacttctgcgctcggcccttccggctggctggtttattgctgataaatctggagccggtgagcgtgggtctcgcggtatcattgcagcactggggccagatggtaagccctcccgtatcgtagttatctacacgacggggagtcaggcaactatggatgaacgaaatagacagatcgctgagataggtgcctcactgattaagcattggtaactgtcagaccaagtttactcataacgcgtcaattcgagggggatcaattccgtgataggtgggctgcccttcctggttggcttggtttcatcagccatccgcttgccctcatctgttacgccggcggtagccggccagcctcgcagagcaggattcccgttgagcaccgccaggtgcgaataagggacagtgaagaaggaacacccgctcgcgggtgggcctacttcacctatcctgcccggctgacgccgttggatacaccaaggaaagtctacacgaaccctttggcaaaatcctgtatatcgtgcgaaaaaggatggatataccgaaaaaatcgctataatgaccccgaagcagggttatgcagcggaaaacggaattgatccggccacgatgcgtccggcgtagaggatctgaagatcagcagttcaacctgttgatagtacgtactaagctctcatgtttcacgtactaagctctcatgtttaacgtactaagctctcatgtttaacgaactaaaccctcatggctaacgtactaagctctcatggctaacgtactaagctctcatgtttcacgtactaagctctcatgtttgaacaataaaattaatataaatcagcaacttaaatagcctctaaggttttaagttttataagaaaaaaaagaatatataaggcttttaaagcttttaag

SEQ ID NO: 33 - DNA, 7051 bp, synthetic construct
  misc_feature 1..7051: note = Description of sequence: pBH103
  source 1..7051: mol_type = other DNA
gtttaacggttgtggacaacaagccagggatgtaacgcactgagaagcccttagagcctctcaaagcaattttgagtgacacaggaacacttaacggctgacatgggaattcccctccaccgcggtggtacaaagaaaattcgacaaactgttatttttctatctatttatttgaattaggagcgctcctaatttacctttgtcggcaattaggagcgctcctaattaaataaagatattctcgtcaaacaaatataaataatataaacatggtttttactctggaagattttgttggcgattggcgtcagaccgcgggttataatttggatcaagtcctggaacagggtggcgtaagctctctgttccagaacctgggtgtgagcgtgacgccgattcagcgcatcgttctgtccggcgagaacggtctgaaaattgatattcatgtgatcatcccgtacgaaggcctgagcggtgaccaaatgggtcaaatcgagaaaatctttaaagtcgtctacccagttgacgatcaccacttcaaggttatcttgcattacggtacgctggtgattgatggtgtgaccccgaatatgattgactatttcggccgtccgtatgaaggcattgccgtttttgacggtaaaaagatcaccgtcaccggtaccctgtggaatggcaataagattattgacgagcgtctgattaacccggacggcagcctgctgttccgcgtgaccatcaacggtgtcacgggttggcgtctgtgcgagcgcatcctggcataatgaactgcacttgctttgataattaatgataaacaatctaaaagcactctaatcgttatcggagtgcttttagattactaatcaaattgcttctactaattgcctatcttccagtgatggaacagcatttgtgcattggctgcaacaatcagccttgatctggaagaagcaatgaaagctgctgttaagtctccgaatcaggtattgttcctgacaggtgtattcccatccggtaaacgcggatactttgcagttgatctgactcaggaataaattataaattaaggtaagaagattgtaggataagctaatgaaatagaaaaaggatgccgtcacacaacttgtcggcattcttttttgttttattagttgaaaatatagtgaaaaagttgcctaaatatgtatgttaacaaattatttgtcgtaactttgcactccaaatctgtttttaacatatggcactagtgaaaccagtaacgttatacgatgtcgcagagtatgccggtgtctctaaaagcaccgtttccctggtggtgaaccaggccagccacgtttctgcgaaaacgcgggaaaaagtggaagcggcgatggcggagctgaattacattcccaaccgcgtggcacaacaactggcgggcaaacagtcgttgctgattggcgttgccacctccagtctggccctgcacgcgccgtcgcaaattgtcgcggcgattaaatctcgcgccgatcaactgggtgccagcgtggtggtgtcgatggtagaacgaagcggcgtcgaagcctgtaaaacggcggtgcacaatcttctcgcgcaacgcgtcagtgggctgatcattaactatccgctggatgaccaggatgccattgctgtggaagctgcctgcactaatgttccggcgttatttcttgatgtctctgaccagacacccatcaacagtattattttctcccatgaagacggtacgcgactgggcgtggagcatctggtcgcattgggtcaccagcaaatcgcgctgttagcgggcccattaagttctgtctcggcgcgtctgcgtctggctggctggcataaatatctcactcgcaatcaaattcagccgatagcggaacgggaaggcgactggagtgccatgtccggttttcaacaaaccatgcaaatgctgaatgagggcatcgttcccactgcgatgctggttgccaacgatcagatggcgctgggcgcaatgcgcgccattaccgagtccgggctgcgcgttggtgcggatatctcggtagtgggatacgacgataccgaagacagctcatgttatatcccgccgttaaccaccatcaaacaggattttcgcctgctggggcaaaccagcgtggaccgcttgctgcaactctctcagggccaggcggtgaagggcaatcagctgttgcccgtctcactggtgaaaagaaaaaccaccctggcgcccaatacgcaaaccgcctctccccgcgcgttggccgattcattaatgcagctggcacgacaggtttcccgactggaaagcgggcagtgagctttcctcggtaccaaattccagaaaagaggcctcccgaaaggggggccttttttcgttttggtcctacttgtgcctgttctatttccgaaccgaccgcttgtatgaatccatcaaaattcgttttctctatgttggattccttgttgctcatattgtgatgataatttctacaaatatagtcattggtaactatctatgaaactgtttgatacttttatagttgattaaacttgttcatggcatttgccttaatatcatccgctatgtcaatgtagggtttcatagctttgtagtcgctgtgtcccgtccatttcatgaccacctgtgccgggattccgagagccagcgcattgcagatgaatgtccttcttcctgcatgggtactgagcaaagcgtatttgggtgtgacttcatcaatacgttcatttcccttgtagtaggtttcccgtacaggctcgttgatttctgccagttcgcccagctctttcaggtaatcgttcatcttctggttgctgatgacgggcagagccatgtaattctcgaaatggatgtccttgtatttgtccagtatggctttgctgtatttgttcagttcaatcgtcaggctgtcggcagtcttgactgtggttatttcgatgtggtcggacttcacatcgcttcttttcagattgcgaacatccgaataccgcaaactcgtaaagcagcagaacaggaaaacatcacgcacacgttccaggtattgcttatccttgggtatctggtagtctttcagcttgttcagttcatcccaagtcaggaagattacttttttcgaggtggttttcagtttcggtttgaacgtatcgtatgcaatgttctgatgatgtcctttcttgaagctccagcgcaggaaccatttgaggaatcccatttgcttgccgatggtgctgtttctcatatccttggtgtcacgcaggaagttgacgtattcgttcaatccaaactcgttgaaatagttgaacgttgcatcctccttgaactctttgaggtggttcctcactgctgcaaatttttcataggtggatgccgtccagttattctggttaccgcactcttttacaaactcatcgaacacctcccaaaagctgacaggggcttcttccggctgttcttcgctggtgtctttcattctcatgttgaaagcttccttcaactgttgggtcgttggcatgacctcctgcacctcaaattccttgaaaatattctggatttcggcatagtatttcagcaagtccgtattgatttcggctgcactttgctttagcttgttggtacatccgctctttacccgctgcttatctgcatcccatttggctacgtcaatccggtagcccgttgtaaactcgatgcgttggctggcaaagatgacacgcatacggatgggtacgttctctacgattggcacaccgttctttttccggctctccaatgcaaaaatgatgttgcgcttgatattcataattgggtgcgtttgaaattctacacccaaatatacacccaattattgagatagcaaaagacatttagaaacatttacttttactctatattgtaatttacacttgattatcagtcgtttgcagtcttatgatattctgtgaaagtataagttcgagagcctgtctctccgcaaaaaacgctgaaaatcagcagattgcaaaacaaacaccctgttttacacccaagaatgtaaagtcggctgtttttgttttatttaagataatacaaccactacataataaaagagtagcgatattaaaagaatccgatgagaaaagactaatatttatctatccattcagtttgatttttcaggactttacatcgtcctgaaagtatttgttggtaccggtaccgaggacgcgtaaacatttacagttgcatgtggcctattgtttttagccgttaaatattttataactattaaatagcgatacaaattgttcgaaactaatattgtttatatcatatattctcgcatgttttaaagctttattaaattgattttttgtaaacagtttttcgtactctttgttaacccatttcattacaaaagtttcatatttttttctctctttaaatgccatttttgctggctttctttttaatacaattaatgtgctatccactttaggttttggatggaaataatacctaggaatttttgctaatatagaaatatctacctctgccattaacagcaatgctagtgatctgtttgtatctaataacattttagcaaaaccatattccactattaaataacttattgtggctgaactttcaaaaacaatttttcgaattatatttgtgcttatgttgtaaggtatgctgccaaatattttatatggattgtggctaggaaatgtaaatttcagtatatcatcatttactatttgatagttaggataatttaagagcttattacgagttacctcacataatttagaatcaatttctatcgccgttacaaaattacatctctttaccaatccagcagtaaaatgacctttccctgcacctatttcaaagatgttatctttttcatctaaacttatgcaattcattattttttctatgtgatattttgaagtaataaaattttgactatcttttatatttactttgttcattataacctctccttaatttattgcatctcttttcgaatatttatgttttttgagaaaagaacgtactcatggttcatcccgatatgcgtatcggtctgtatatcagcaactttctatgtgtttcaactacaatagtcatctattctcatctttctgagtccaccccctgcaaagcccctctttacgacataaaaattcggtcggaaaaggtatgcaaaagatgtttctctctttaagagaaactcttcgggatgcaaaaatatgaaaataactccaattcaccaaattatatagcgacttttttacaaaatgctaaaatttgttgatttccgtcaagcaattgttgagcaaaaatgtcttttacgataaaatgatacctcaatatcaactgtttagcaaaacgatatttctcttaaagagagaaacacctttttgttcaccaatccccgacttttaatcccgcggccatgattgaaaaaggaagagtatgagtattcaacatttccgtgtcgcccttattcccttttttgcggcattttgccttcctgtttttgctcacccagaaacgctggtgaaagtaaaagatgctgaagatcagttgggtgcacgagtgggttacatcgaactggatctcaacagcggtaagatccttgagagttttcgccccgaagaacgttttccaatgatgagcacttttaaagttctgctatgtggcgcggtattatcccgtattgacgccgggcaagagcaactcggtcgccgcatacactattctcagaatgacttggttgagtactcaccagtcacagaaaagcatcttacggatggcatgacagtaagagaattatgcagtgctgccataaccatgagtgataacactgcggccaacttacttctgacaacgatcggaggaccgaaggagctaaccgcttttttgcacaacatgggggatcatgtaactcgccttgatcgttgggaaccggagctgaatgaagccataccaaacgacgagcgtgacaccacgatgcctgtagcaatggcaacaacgttgcgcaaactattaactggcgaactacttactctagcttcccggcaacaattaatagactggatggaggcggataaagttgcaggaccacttctgcgctcggcccttccggctggctggtttattgctgataaatctggagccggtgagcgtgggtctcgcggtatcattgcagcactggggccagatggtaagccctcccgtatcgtagttatctacacgacggggagtcaggcaactatggatgaacgaaatagacagatcgctgagataggtgcctcactgattaagcattggtaactgtcagaccaagtttactcataacgcgtcaattcgagggggatcaattccgtgataggtgggctgcccttcctggttggcttggtttcatcagccatccgcttgccctcatctgttacgccggcggtagccggccagcctcgcagagcaggattcccgttgagcaccgccaggtgcgaataagggacagtgaagaaggaacacccgctcgcgggtgggcctacttcacctatcctgcccggctgacgccgttggatacaccaaggaaagtctacacgaaccctttggcaaaatcctgtatatcgtgcgaaaaaggatggatataccgaaaaaatcgctataatgaccccgaagcagggttatgcagcggaaaacggaattgatccggccacgatgcgtccggcgtagaggatctgaagatcagcagttcaacctgttgatagtacgtactaagctctcatgtttcacgtactaagctctcatgtttaacgtactaagctctcatgtttaacgaactaaaccctcatggctaacgtactaagctctcatggctaacgtactaagctctcatgtttcacgtactaagctctcatgtttgaacaataaaattaatataaatcagcaacttaaatagcctctaaggttttaagttttataagaaaaaaaagaatatataaggcttttaaagcttttaag

SEQ ID NO: 34 - DNA, 7051 bp, synthetic construct
  misc_feature 1..7051: note = Description of sequence: pBH104
  source 1..7051: mol_type = other DNA
gtttaacggttgtggacaacaagccagggatgtaacgcactgagaagcccttagagcctctcaaagcaattttgagtgacacaggaacacttaacggctgacatgggaattcccctccaccgcggtggtacaaagaaaattcgacaaactgttatttttctatctatttatttgaattttgagcgctcaaaatttacctttgtcggcaattttgagcgctcaaaattaaataaagatattctcgtcaaacaaatataaataatataaacatggtttttactctggaagattttgttggcgattggcgtcagaccgcgggttataatttggatcaagtcctggaacagggtggcgtaagctctctgttccagaacctgggtgtgagcgtgacgccgattcagcgcatcgttctgtccggcgagaacggtctgaaaattgatattcatgtgatcatcccgtacgaaggcctgagcggtgaccaaatgggtcaaatcgagaaaatctttaaagtcgtctacccagttgacgatcaccacttcaaggttatcttgcattacggtacgctggtgattgatggtgtgaccccgaatatgattgactatttcggccgtccgtatgaaggcattgccgtttttgacggtaaaaagatcaccgtcaccggtaccctgtggaatggcaataagattattgacgagcgtctgattaacccggacggcagcctgctgttccgcgtgaccatcaacggtgtcacgggttggcgtctgtgcgagcgcatcctggcataatgaactgcacttgctttgataattaatgataaacaatctaaaagcactctaatcgttatcggagtgcttttagattactaatcaaattgcttctactaattgcctatcttccagtgatggaacagcatttgtgcattggctgcaacaatcagccttgatctggaagaagcaatgaaagctgctgttaagtctccgaatcaggtattgttcctgacaggtgtattcccatccggtaaacgcggatactttgcagttgatctgactcaggaataaattataaattaaggtaagaagattgtaggataagctaatgaaatagaaaaaggatgccgtcacacaacttgtcggcattcttttttgttttattagttgaaaatatagtgaaaaagttgcctaaatatgtatgttaacaaattatttgtcgtaactttgcactccaaatctgtttttaacatatggcactagtgaaaccagtaacgttatacgatgtcgcagagtatgccggtgtctctcatcagaccgtttccaatgtggtgaaccaggccagccacgtttctgcgaaaacgcgggaaaaagtggaagcggcgatggcggagctgaattacattcccaaccgcgtggcacaacaactggcgggcaaacagtcgttgctgattggcgttgccacctccagtctggccctgcacgcgccgtcgcaaattgtcgcggcgattaaatctcgcgccgatcaactgggtgccagcgtggtggtgtcgatggtagaacgaagcggcgtcgaagcctgtaaaacggcggtgcacaatcttctcgcgcaacgcgtcagtgggctgatcattaactatccgctggatgaccaggatgccattgctgtggaagctgcctgcactaatgttccggcgttatttcttgatgtctctgaccagacacccatcaacagtattattttctcccatgaagacggtacgcgactgggcgtggagcatctggtcgcattgggtcaccagcaaatcgcgctgttagcgggcccattaagttctgtctcggcgcgtctgcgtctggctggctggcataaatatctcactcgcaatcaaattcagccgatagcggaacgggaaggcgactggagtgccatgtccggttttcaacaaaccatgcaaatgctgaatgagggcatcgttcccactgcgatgctggttgccaacgatcagatggcgctgggcgcaatgcgcgccattaccgagtccgggctgcgcgttggtgcggatatctcggtagtgggatacgacgataccgaagacagctcatgttatatcccgccgttaaccaccatcaaacaggattttcgcctgctggggcaaaccagcgtggaccgcttgctgcaactctctcagggccaggcggtgaagggcaatcagctgttgcccgtctcactggtgaaaagaaaaaccaccctggcgcccaatacgcaaaccgcctctccccgcgcgttggccgattcattaatgcagctggcacgacaggtttcccgactggaaagcgggcagtgagctttcctcggtaccaaattccagaaaagaggcctcccgaaaggggggccttttttcgttttggtcctacttgtgcctgttctatttccgaaccgaccgcttgtatgaatccatcaaaattcgttttctctatgttggattccttgttgctcatattgtgatgataatttctacaaatatagtcattggtaactatctatgaaactgtttgatacttttatagttgattaaacttgttcatggcatttgccttaatatcatccgctatgtcaatgtagggtttcatagctttgtagtcgctgtgtcccgtccatttcatgaccacctgtgccgggattccgagagccagcgcattgcagatgaatgtccttcttcctgcatgggtactgagcaaagcgtatttgggtgtgacttcatcaatacgttcatttcccttgtagtaggtttcccgtacaggctcgttgatttctgccagttcgcccagctctttcaggtaatcgttcatcttctggttgctgatgacgggcagagccatgtaattctcgaaatggatgtccttgtatttgtccagtatggctttgctgtatttgttcagttcaatcgtcaggctgtcggcagtcttgactgtggttatttcgatgtggtcggacttcacatcgcttcttttcagattgcgaacatccgaataccgcaaactcgtaaagcagcagaacaggaaaacatcacgcacacgttccaggtattgcttatccttgggtatctggtagtctttcagcttgttcagttcatcccaagtcaggaagattacttttttcgaggtggttttcagtttcggtttgaacgtatcgtatgcaatgttctgatgatgtcctttcttgaagctccagcgcaggaaccatttgaggaatcccatttgcttgccgatggtgctgtttctcatatccttggtgtcacgcaggaagttgacgtattcgttcaatccaaactcgttgaaatagttgaacgttgcatcctccttgaactctttgaggtggttcctcactgctgcaaatttttcataggtggatgccgtccagttattctggttaccgcactcttttacaaactcatcgaacacctcccaaaagctgacaggggcttcttccggctgttcttcgctggtgtctttcattctcatgttgaaagcttccttcaactgttgggtcgttggcatgacctcctgcacctcaaattccttgaaaatattctggatttcggcatagtatttcagcaagtccgtattgatttcggctgcactttgctttagcttgttggtacatccgctctttacccgctgcttatctgcatcccatttggctacgtcaatccggtagcccgttgtaaactcgatgcgttggctggcaaagatgacacgcatacggatgggtacgttctctacgattggcacaccgttctttttccggctctccaatgcaaaaatgatgttgcgcttgatattcataattgggtgcgtttgaaattctacacccaaatatacacccaattattgagatagcaaaagacatttagaaacatttacttttactctatattgtaatttacacttgattatcagtcgtttgcagtcttatgatattctgtgaaagtataagttcgagagcctgtctctccgcaaaaaacgctgaaaatcagcagattgcaaaacaaacaccctgttttacacccaagaatgtaaagtcggctgtttttgttttatttaagataatacaaccactacataataaaagagtagcgatattaaaagaatccgatgagaaaagactaatatttatctatccattcagtttgatttttcaggactttacatcgtcctgaaagtatttgttggtaccggtaccgaggacgcgtaaacatttacagttgcatgtggcctattgtttttagccgttaaatattttataactattaaatagcgatacaaattgttcgaaactaatattgtttatatcatatattctcgcatgttttaaagctttattaaattgattttttgtaaacagtttttcgtactctttgttaacccatttcattacaaaagtttcatatttttttctctctttaaatgccatttttgctggctttctttttaatacaattaatgtgctatccactttaggttttggatggaaataatacctaggaatttttgctaatatagaaatatctacctctgccattaacagcaatgctagtgatctgtttgtatctaataacattttagcaaaaccatattccactattaaataacttattgtggctgaactttcaaaaacaatttttcgaattatatttgtgcttatgttgtaaggtatgctgccaaatattttatatggattgtggctaggaaatgtaaatttcagtatatcatcatttactatttgatagttaggataatttaagagcttattacgagttacctcacataatttagaatcaatttctatcgccgttacaaaattacatctctttaccaatccagcagtaaaatgacctttccctgcacctatttcaaagatgttatctttttcatctaaacttatgcaattcattattttttctatgtgatattttgaagtaataaaattttgactatcttttatatttactttgttcattataacctctccttaatttattgcatctcttttcgaatatttatgttttttgagaaaagaacgtactcatggttcatcccgatatgcgtatcggtctgtatatcagcaactttctatgtgtttcaactacaatagtcatctattctcatctttctgagtccaccccctgcaaagcccctctttacgacataaaaattcggtcggaaaaggtatgcaaaagatgtttctctctttaagagaaactcttcgggatgcaaaaatatgaaaataactccaattcaccaaattatatagcgacttttttacaaaatgctaaaatttgttgatttccgtcaagcaattgttgagcaaaaatgtcttttacgataaaatgatacctcaatatcaactgtttagcaaaacgatatttctcttaaagagagaaacacctttttgttcaccaatccccgacttttaatcccgcggccatgattgaaaaaggaagagtatgagtattcaacatttccgtgtcgcccttattcccttttttgcggcattttgccttcctgtttttgctcacccagaaacgctggtgaaagtaaaagatgctgaagatcagttgggtgcacgagtgggttacatcgaactggatctcaacagcggtaagatccttgagagttttcgccccgaagaacgttttccaatgatgagcacttttaaagttctgctatgtggcgcggtattatcccgtattgacgccgggcaagagcaactcggtcgccgcatacactattctcagaatgacttggttgagtactcaccagtcacagaaaagcatcttacggatggcatgacagtaagagaattatgcagtgctgccataaccatgagtgataacactgcggccaacttacttctgacaacgatcggaggaccgaaggagctaaccgcttttttgcacaacatgggggatcatgtaactcgccttgatcgttgggaaccggagctgaatgaagccataccaaacgacgagcgtgacaccacgatgcctgtagcaatggcaacaacgttgcgcaaactattaactggcgaactacttactctagcttcccggcaacaattaatagactggatggaggcggataaagttgcaggaccacttctgcgctcggcccttccggctggctggtttattgctgataaatctggagccggtgagcgtgggtctcgcggtatcattgcagcactggggccagatggtaagccctcccgtatcgtagttatctacacgacggggagtcaggcaactatggatgaacgaaatagacagatcgctgagataggtgcctcactgattaagcattggtaactgtcagaccaagtttactcataacgcgtcaattcgagggggatcaattccgtgataggtgggctgcccttcctggttggcttggtttcatcagccatccgcttgccctcatctgttacgccggcggtagccggccagcctcgcagagcaggattcccgttgagcaccgccaggtgcgaataagggacagtgaagaaggaacacccgctcgcgggtgggcctacttcacctatcctgcccggctgacgccgttggatacaccaaggaaagtctacacgaaccctttggcaaaatcctgtatatcgtgcgaaaaaggatggatataccgaaaaaatcgctataatgaccccgaagcagggttatgcagcggaaaacggaattgatccggccacgatgcgtccggcgtagaggatctgaagatcagcagttcaacctgttgatagtacgtactaagctctcatgtttcacgtactaagctctcatgtttaacgtactaagctctcatgtttaacgaactaaaccctcatggctaacgtactaagctctcatggctaacgtactaagctctcatgtttcacgtactaagctctcatgtttgaacaataaaattaatataaatcagcaacttaaatagcctctaaggttttaagttttataagaaaaaaaagaatatataaggcttttaaagcttttaag

SEQ ID NO: 35 - DNA, 7051 bp, synthetic construct
  misc_feature 1..7051: note = Description of sequence: pBH105
  source 1..7051: mol_type = other DNA
gtttaacggttgtggacaacaagccagggatgtaacgcactgagaagcccttagagcctctcaaagcaattttgagtgacacaggaacacttaacggctgacatgggaattcccctccaccgcggtggtacaaagaaaattcgacaaactgttatttttctatctatttatttgaattgacagcgctgtcaatttacctttgtcggcaattgacagcgctgtcaattaaataaagatattctcgtcaaacaaatataaataatataaacatggtttttactctggaagattttgttggcgattggcgtcagaccgcgggttataatttggatcaagtcctggaacagggtggcgtaagctctctgttccagaacctgggtgtgagcgtgacgccgattcagcgcatcgttctgtccggcgagaacggtctgaaaattgatattcatgtgatcatcccgtacgaaggcctgagcggtgaccaaatgggtcaaatcgagaaaatctttaaagtcgtctacccagttgacgatcaccacttcaaggttatcttgcattacggtacgctggtgattgatggtgtgaccccgaatatgattgactatttcggccgtccgtatgaaggcattgccgtttttgacggtaaaaagatcaccgtcaccggtaccctgtggaatggcaataagattattgacgagcgtctgattaacccggacggcagcctgctgttccgcgtgaccatcaacggtgtcacgggttggcgtctgtgcgagcgcatcctggcataatgaactgcacttgctttgataattaatgataaacaatctaaaagcactctaatcgttatcggagtgcttttagattactaatcaaattgcttctactaattgcctatcttccagtgatggaacagcatttgtgcattggctgcaacaatcagccttgatctggaagaagcaatgaaagctgctgttaagtctccgaatcaggtattgttcctgacaggtgtattcccatccggtaaacgcggatactttgcagttgatctgactcaggaataaattataaattaaggtaagaagattgtaggataagctaatgaaatagaaaaaggatgccgtcacacaacttgtcggcattcttttttgttttattagttgaaaatatagtgaaaaagttgcctaaatatgtatgttaacaaattatttgtcgtaactttgcactccaaatctgtttttaacatatggcactagtgaaaccagtaacgttatacgatgtcgcagagtatgccggtgtctctggaaagaccgtttcccgcgtggtgaaccaggccagccacgtttctgcgaaaacgcgggaaaaagtggaagcggcgatggcggagctgaattacattcccaaccgcgtggcacaacaactggcgggcaaacagtcgttgctgattggcgttgccacctccagtctggccctgcacgcgccgtcgcaaattgtcgcggcgattaaatctcgcgccgatcaactgggtgccagcgtggtggtgtcgatggtagaacgaagcggcgtcgaagcctgtaaaacggcggtgcacaatcttctcgcgcaacgcgtcagtgggctgatcattaactatccgctggatgaccaggatgccattgctgtggaagctgcctgcactaatgttccggcgttatttcttgatgtctctgaccagacacccatcaacagtattattttctcccatgaagacggtacgcgactgggcgtggagcatctggtcgcattgggtcaccagcaaatcgcgctgttagcgggcccattaagttctgtctcggcgcgtctgcgtctggctggctggcataaatatctcactcgcaatcaaattcagccgatagcggaacgggaaggcgactggagtgccatgtccggttttcaacaaaccatgcaaatgctgaatgagggcatcgttcccactgcgatgctggttgccaacgatcagatggcgctgggcgcaatgcgcgccattaccgagtccgggctgcgcgttggtgcggatatctcggtagtgggatacgacgataccgaagacagctcatgttatatcccgccgttaaccaccatcaaacaggattttcgcctgctggggcaaaccagcgtggaccgcttgctgcaactctctcagggccaggcggtgaagggcaatcagctgttgcccgtctcactggtgaaaagaaaaaccaccctggcgcccaatacgcaaaccgcctctccccgcgcgttggccgattcattaatgcagctggcacgacaggtttcccgactggaaagcgggcagtgagctttcctcggtaccaaattccagaaaagaggcctcccgaaaggggggccttttttcgttttggtcctacttgtgcctgttctatttccgaaccgaccgcttgtatgaatccatcaaaattcgttttctctatgttggattccttgttgctcatattgtgatgataatttctacaaatatagtcattggtaactatctatgaaactgtttgatacttttatagttgattaaacttgttcatggcatttgccttaatatcatccgctatgtcaatgtagggtttcatagctttgtagtcgctgtgtcccgtccatttcatgaccacctgtgccgggattccgagagccagcgcattgcagatgaatgtccttcttcctgcatgggtactgagcaaagcgtatttgggtgtgacttcatcaatacgttcatttcccttgtagtaggtttcccgtacaggctcgttgatttctgccagttcgcccagctctttcaggtaatcgttcatcttctggttgctgatgacgggcagagccatgtaattctcgaaatggatgtccttgtatttgtccagtatggctttgctgtatttgttcagttcaatcgtcaggctgtcggcagtcttgactgtggttatttcgatgtggtcggacttcacatcgcttcttttcagattgcgaacatccgaataccgcaaactcgtaaagcagcagaacaggaaaacatcacgcacacgttccaggtattgcttatccttgggtatctggtagtctttcagcttgttcagttcatcccaagtcaggaagattacttttttcgaggtggttttcagtttcggtttgaacgtatcgtatgcaatgttctgatgatgtcctttcttgaagctccagcgcaggaaccatttgaggaatcccatttgcttgccgatggtgctgtttctcatatccttggtgtcacgcaggaagttgacgtattcgttcaatccaaactcgttgaaatagttgaacgttgcatcctccttgaactctttgaggtggttcctcactgctgcaaatttttcataggtggatgccgtccagttattctggttaccgcactcttttacaaactcatcgaacacctcccaaaagctgacaggggcttcttccggctgttcttcgctggtgtctttcattctcatgttgaaagcttccttcaactgttgggtcgttggcatgacctcctgcacctcaaattccttgaaaatattctggatttcggcatagtatttcagcaagtccgtattgatttcggctgcactttgctttagcttgttggtacatccgctctttacccgctgcttatctgcatcccatttggctacgtcaatccggtagcccgttgtaaactcgatgcgttggctggcaaagatgacacgcatacggatgggtacgttctctacgattggcacaccgttctttttccggctctccaatgcaaaaatgatgttgcgcttgatattcataattgggtgcgtttgaaattctacacccaaatatacacccaattattgagatagcaaaagacatttagaaacatttacttttactctatattgtaatttacacttgattatcagtcgtttgcagtcttatgatattctgtgaaagtataagttcgagagcctgtctctccgcaaaaaacgctgaaaatcagcagattgcaaaacaaacaccctgttttacacccaagaatgtaaagtcggctgtttttgttttatttaagataatacaaccactacataataaaagagtagcgatattaaaagaatccgatgagaaaagactaatatttatctatccattcagtttgatttttcaggactttacatcgtcctgaaagtatttgttggtaccggtaccgaggacgcgtaaacatttacagttgcatgtggcctattgtttttagccgttaaatattttataactattaaatagcgatacaaattgttcgaaactaatattgtttatatcatatattctcgcatgttttaaagctttattaaattgattttttgtaaacagtttttcgtactctttgttaacccatttcattacaaaagtttcatatttttttctctctttaaatgccatttttgctggctttctttttaatacaattaatgtgctatccactttaggttttggatggaaataatacctaggaatttttgctaatatagaaatatctacctctgccattaacagcaatgctagtgatctgtttgtatctaataacattttagcaaaaccatattccactattaaataacttattgtggctgaactttcaaaaacaatttttcgaattatatttgtgcttatgttgtaaggtatgctgccaaatattttatatggattgtggctaggaaatgtaaatttcagtatatcatcatttactatttgatagttaggataatttaagagcttattacgagttacctcacataatttagaatcaatttctatcgccgttacaaaattacatctctttaccaatccagcagtaaaatgacctttccctgcacctatttcaaagatgttatctttttcatctaaacttatgcaattcattattttttctatgtgatattttgaagtaataaaattttgactatcttttatatttactttgttcattataacctctccttaatttattgcatctcttttcgaatatttatgttttttgagaaaagaacgtactcatggttcatcccgatatgcgtatcggtctgtatatcagcaactttctatgtgtttcaactacaatagtcatctattctcatctttctgagtccaccccctgcaaagcccctctttacgacataaaaattcggtcggaaaaggtatgcaaaagatgtttctctctttaagagaaactcttcgggatgcaaaaatatgaaaataactccaattcaccaaattatatagcgacttttttacaaaatgctaaaatttgttgatttccgtcaagcaattgttgagcaaaaatgtcttttacgataaaatgatacctcaatatcaactgtttagcaaaacgatatttctcttaaagagagaaacacctttttgttcaccaatccccgacttttaatcccgcggccatgattgaaaaaggaagagtatgagtattcaacatttccgtgtcgcccttattcccttttttgcggcattttgccttcctgtttttgctcacccagaaacgctggtgaaagtaaaagatgctgaagatcagttgggtgcacgagtgggttacatcgaactggatctcaacagcggtaagatccttgagagttttcgccccgaagaacgttttccaatgatgagcacttttaaagttctgctatgtggcgcggtattatcccgtattgacgccgggcaagagcaactcggtcgccgcatacactattctcagaatgacttggttgagtactcaccagtcacagaaaagcatcttacggatggcatgacagtaagagaattatgcagtgctgccataaccatgagtgataacactgcggccaacttacttctgacaacgatcggaggaccgaaggagctaaccgcttttttgcacaacatgggggatcatgtaactcgccttgatcgttgggaaccggagctgaatgaagccataccaaacgacgagcgtgacaccacgatgcctgtagcaatggcaacaacgttgcgcaaactattaactggcgaactacttactctagcttcccggcaacaattaatagactggatggaggcggataaagttgcaggaccacttctgcgctcggcccttccggctggctggtttattgctgataaatctggagccggtgagcgtgggtctcgcggtatcattgcagcactggggccagatggtaagccctcccgtatcgtagttatctacacgacggggagtcaggcaactatggatgaacgaaatagacagatcgctgagataggtgcctcactgattaagcattggtaactgtcagaccaagtttactcataacgcgtcaattcgagggggatcaattccgtgataggtgggctgcccttcctggttggcttggtttcatcagccatccgcttgccctcatctgttacgccggcggtagccggccagcctcgcagagcaggattcccgttgagcaccgccaggtgcgaataagggacagtgaagaaggaacacccgctcgcgggtgggcctacttcacctatcctgcccggctgacgccgttggatacaccaaggaaagtctacacgaaccctttggcaaaatcctgtatatcgtgcgaaaaaggatggatataccgaaaaaatcgctataatgaccccgaagcagggttatgcagcggaaaacggaattgatccggccacgatgcgtccggcgtagaggatctgaagatcagcagttcaacctgttgatagtacgtactaagctctcatgtttcacgtactaagctctcatgtttaacgtactaagctctcatgtttaacgaactaaaccctcatggctaacgtactaagctctcatggctaacgtactaagctctcatgtttcacgtactaagctctcatgtttgaacaataaaattaatataaatcagcaacttaaatagcctctaaggttttaagttttataagaaaaaaaagaatatataaggcttttaaagcttttaag

SEQ ID NO: 36 - DNA, 7085 bp, synthetic construct
  misc_feature 1..7085: note = Description of sequence: pBH106
  source 1..7085: mol_type = other DNA
gtttaacggttgtggacaacaagccagggatgtaacgcactgagaagcccttagagcctctcaaagcaattttgagtgacacaggaacacttaacggctgacatgggaattcccctccaccgcggtggtacaaagaaaattcgacaaactgttatttttctatctatttatttgaattgtgagcggataacaattacctttgtcggcaattgtgagcggataacaattaaataaagatattctcgtcaaacaaatataaataatataaacatggtttttactctggaagattttgttggcgattggcgtcagaccgcgggttataatttggatcaagtcctggaacagggtggcgtaagctctctgttccagaacctgggtgtgagcgtgacgccgattcagcgcatcgttctgtccggcgagaacggtctgaaaattgatattcatgtgatcatcccgtacgaaggcctgagcggtgaccaaatgggtcaaatcgagaaaatctttaaagtcgtctacccagttgacgatcaccacttcaaggttatcttgcattacggtacgctggtgattgatggtgtgaccccgaatatgattgactatttcggccgtccgtatgaaggcattgccgtttttgacggtaaaaagatcaccgtcaccggtaccctgtggaatggcaataagattattgacgagcgtctgattaacccggacggcagcctgctgttccgcgtgaccatcaacggtgtcacgggttggcgtctgtgcgagcgcatcctggcataatgaactgcacttgctttgataattaatgataaacaatctaaaagcactctaatcgttatcggagtgcttttagattactaatcaaattgcttctactaattgcctatcttccagtgatggaacagcatttgtgcattggctgcaacaatcagccttgatctggaagaagcaatgaaagctgctgttaagtctccgaatcaggtattgttcctgacaggtgtattcccatccggtaaacgcggatactttgcagttgatctgactcaggaataaattataaattaaggtaagaagattgtaggataagctaatgaaatagaaaaaggatgccgtcacacaacttgtcggcattcttttttgttttattagttgaaaatatagtgaaaaagttgcctaaatatgtatgttaacaaattatttgtcgtaactttgcactccaaatctgtttttaacatatggcactagtgaaaccagtaacgttatacgatgtcgcagagtatgccggtgtctcttatcagaccgtttcccgcgtggtgaaccaggccagccacgtttctgcgaaaacgcgggaaaaagtggaagcggcgatggcggagctcaattacattcccaaccgcgtggcacaacaactggcgggcaaagcgtcgcataccattggcatgttgatcactgccagtaccaatcctttctattcagaactggtgcgtggcgttgaacgcagctgcttcgaacgcggttatagtctcgtcctttgcaataccgaaggcgatgaacagcggatgaatcgcaatctggaaacgctgatgcaaaaacgcgttgatggcttgctgttactgtgcaccgaaacgcatcaaccttcgcgtgaaatcatgcaacgttatccgacagtgcctactgtgatgatggactgggctccgttcgatggcgacagcgatcttattcaggataactcgttgctgggcggagacttagcaacgcaatatctgatcgataaaggtcatacccgtatcgcctgtattaccggcccgctggataaaactccggcgcgcctgcggttggaaggttatcgggcggcgatgaaacgtgcgggtctcaacattcctgatggctatgaagtcactggtgattttgaatttaacggcgggtttgacgctatgcgccaactgctatcacatccgctgcgtcctcaggccgtctttaccggaaatgacgctatggctgttggcgtttaccaggcgttatatcaggcagagttacaggttccgcaggatatcgcggtgattggctatgacgatatcgaactggcaagctttatgacgccaccattaaccactatccaccaaccgaaagatgaactgggggagctggcgattgatgtactcatccatcggataacccagccgacccttcagcaacaacgattacaacttactccgattctgatggaacgcggttcggcttagctggtgaaaagaaaaaccaccctggcgcccaatacgcaaaccgcctctccccgcgcgttggccgattcattaatgcagctggcacgacaggtttcccgactggaaagcgggcagtgagctttcctcggtaccaaattccagaaaagaggcctcccgaaaggggggccttttttcgttttggtcctacttgtgcctgttctatttccgaaccgaccgcttgtatgaatccatcaaaattcgttttctctatgttggattccttgttgctcatattgtgatgataatttctacaaatatagtcattggtaactatctatgaaactgtttgatacttttatagttgattaaacttgttcatggcatttgccttaatatcatccgctatgtcaatgtagggtttcatagctttgtagtcgctgtgtcccgtccatttcatgaccacctgtgccgggattccgagagccagcgcattgcagatgaatgtccttcttcctgcatgggtactgagcaaagcgtatttgggtgtgacttcatcaatacgttcatttcccttgtagtaggtttcccgtacaggctcgttgatttctgccagttcgcccagctctttcaggtaatcgttcatcttctggttgctgatgacgggcagagccatgtaattctcgaaatggatgtccttgtatttgtccagtatggctttgctgtatttgttcagttcaatcgtcaggctgtcggcagtcttgactgtggttatttcgatgtggtcggacttcacatcgcttcttttcagattgcgaacatccgaataccgcaaactcgtaaagcagcagaacaggaaaacatcacgcacacgttccaggtattgcttatccttgggtatctggtagtctttcagcttgttcagttcatcccaagtcaggaagattacttttttcgaggtggttttcagtttcggtttgaacgtatcgtatgcaatgttctgatgatgtcctttcttgaagctccagcgcaggaaccatttgaggaatcccatttgcttgccgatggtgctgtttctcatatccttggtgtcacgcaggaagttgacgtattcgttcaatccaaactcgttgaaatagttgaacgttgcatcctccttgaactctttgaggtggttcctcactgctgcaaatttttcataggtggatgccgtccagttattctggttaccgcactcttttacaaactcatcgaacacctcccaaaagctgacaggggcttcttccggctgttcttcgctggtgtctttcattctcatgttgaaagcttccttcaactgttgggtcgttggcatgacctcctgcacctcaaattccttgaaaatattctggatttcggcatagtatttcagcaagtccgtattgatttcggctgcactttgctttagcttgttggtacatccgctctttacccgctgcttatctgcatcccatttggctacgtcaatccggtagcccgttgtaaactcgatgcgttggctggcaaagatgacacgcatacggatgggtacgttctctacgattggcacaccgttctttttccggctctccaatgcaaaaatgatgttgcgcttgatattcataattgggtgcgtttgaaattctacacccaaatatacacccaattattgagatagcaaaagacatttagaaacatttacttttactctatattgtaatttacacttgattatcagtcgtttgcagtcttatgatattctgtgaaagtataagttcgagagcctgtctctccgcaaaaaacgctgaaaatcagcagattgcaaaacaaacaccctgttttacacccaagaatgtaaagtcggctgtttttgttttatttaagataatacaaccactacataataaaagagtagcgatattaaaagaatccgatgagaaaagactaatatttatctatccattcagtttgatttttcaggactttacatcgtcctgaaagtatttgttggtaccggtaccgaggacgcgtaaacatttacagttgcatgtggcctattgtttttagccgttaaatattttataactattaaatagcgatacaaattgttcgaaactaatattgtttatatcatatattctcgcatgttttaaagctttattaaattgattttttgtaaacagtttttcgtactctttgttaacccatttcattacaaaagtttcatatttttttctctctttaaatgccatttttgctggctttctttttaatacaattaatgtgctatccactttaggttttggatggaaataatacctaggaatttttgctaatatagaaatatctacctctgccattaacagcaatgctagtgatctgtttgtatctaataacattttagcaaaaccatattccactattaaataacttattgtggctgaactttcaaaaacaatttttcgaattatatttgtgcttatgttgtaaggtatgctgccaaatattttatatggattgtggctaggaaatgtaaatttcagtatatcatcatttactatttgatagttaggataatttaagagcttattacgagttacctcacataatttagaatcaatttctatcgccgttacaaaattacatctctttaccaatccagcagtaaaatgacctttccctgcacctatttcaaagatgttatctttttcatctaaacttatgcaattcattattttttctatgtgatattttgaagtaataaaattttgactatcttttatatttactttgttcattataacctctccttaatttattgcatctcttttcgaatatttatgttttttgagaaaagaacgtactcatggttcatcccgatatgcgtatcggtctgtatatcagcaactttctatgtgtttcaactacaatagtcatctattctcatctttctgagtccaccccctgcaaagcccctctttacgacataaaaattcggtcggaaaaggtatgcaaaagatgtttctctctttaagagaaactcttcgggatgcaaaaatatgaaaataactccaattcaccaaattatatagcgacttttttacaaaatgctaaaatttgttgatttccgtcaagcaattgttgagcaaaaatgtcttttacgataaaatgatacctcaatatcaactgtttagcaaaacgatatttctcttaaagagagaaacacctttttgttcaccaatccccgacttttaatcccgcggccatgattgaaaaaggaagagtatgagtattcaacatttccgtgtcgcccttattcccttttttgcggcattttgccttcctgtttttgctcacccagaaacgctggtgaaagtaaaagatgctgaagatcagttgggtgcacgagtgggttacatcgaactggatctcaacagcggtaagatccttgagagttttcgccccgaagaacgttttccaatgatgagcacttttaaagttctgctatgtggcgcggtattatcccgtattgacgccgggcaagagcaactcggtcgccgcatacactattctcagaatgacttggttgagtactcaccagtcacagaaaagcatcttacggatggcatgacagtaagagaattatgcagtgctgccataaccatgagtgataacactgcggccaacttacttctgacaacgatcggaggaccgaaggagctaaccgcttttttgcacaacatgggggatcatgtaactcgccttgatcgttgggaaccggagctgaatgaagccataccaaacgacgagcgtgacaccacgatgcctgtagcaatggcaacaacgttgcgcaaactattaactggcgaactacttactctagcttcccggcaacaattaatagactggatggaggcggataaagttgcaggaccacttctgcgctcggcccttccggctggctggtttattgctgataaatctggagccggtgagcgtgggtctcgcggtatcattgcagcactggggccagatggtaagccctcccgtatcgtagttatctacacgacggggagtcaggcaactatggatgaacgaaatagacagatcgctgagataggtgcctcactgattaagcattggtaactgtcagaccaagtttactcataacgcgtcaattcgagggggatcaattccgtgataggtgggctgcccttcctggttggcttggtttcatcagccatccgcttgccctcatctgttacgccggcggtagccggccagcctcgcagagcaggattcccgttgagcaccgccaggtgcgaataagggacagtgaagaaggaacacccgctcgcgggtgggcctacttcacctatcctgcccggctgacgccgttggatacaccaaggaaagtctacacgaaccctttggcaaaatcctgtatatcgtgcgaaaaaggatggatataccgaaaaaatcgctataatgaccccgaagcagggttatgcagcggaaaacggaattgatccggccacgatgcgtccggcgtagaggatctgaagatcagcagttcaacctgttgatagtacgtactaagctctcatgtttcacgtactaagctctcatgtttaacgtactaagctctcatgtttaacgaactaaaccctcatggctaacgtactaagctctcatggctaacgtactaagctctcatgtttcacgtactaagctctcatgtttgaacaataaaattaatataaatcagcaacttaaatagcctctaaggttttaagttttataagaaaaaaaagaatatataaggcttttaaagcttttaag

SEQ ID NO: 37 - DNA, 7084 bp, synthetic construct
  misc_feature 1..7084: note = Description of sequence: pBH107
  source 1..7084: mol_type = other DNA
gtttaacggttgtggacaacaagccagggatgtaacgcactgagaagcccttagagcctctcaaagcaattttgagtgacacaggaacacttaacggctgacatgggaattcccctccaccgcggtggtacaaagaaaattcgacaaactgttatttttctatctatttatttgaattttaagcgcttaaaatttacctttgtcggcaattttaagcgcttaaaattaaataaagatattctcgtcaaacaaatataaataatataaacatggtttttactctggaagattttgttggcgattggcgtcagaccgcgggttataatttggatcaagtcctggaacagggtggcgtaagctctctgttccagaacctgggtgtgagcgtgacgccgattcagcgcatcgttctgtccggcgagaacggtctgaaaattgatattcatgtgatcatcccgtacgaaggcctgagcggtgaccaaatgggtcaaatcgagaaaatctttaaagtcgtctacccagttgacgatcaccacttcaaggttatcttgcattacggtacgctggtgattgatggtgtgaccccgaatatgattgactatttcggccgtccgtatgaaggcattgccgtttttgacggtaaaaagatcaccgtcaccggtaccctgtggaatggcaataagattattgacgagcgtctgattaacccggacggcagcctgctgttccgcgtgaccatcaacggtgtcacgggttggcgtctgtgcgagcgcatcctggcataatgaactgcacttgctttgataattaatgataaacaatctaaaagcactctaatcgttatcggagtgcttttagattactaatcaaattgcttctactaattgcctatcttccagtgatggaacagcatttgtgcattggctgcaacaatcagccttgatctggaagaagcaatgaaagctgctgttaagtctccgaatcaggtattgttcctgacaggtgtattcccatccggtaaacgcggatactttgcagttgatctgactcaggaataaattataaattaaggtaagaagattgtaggataagctaatgaaatagaaaaaggatgccgtcacacaacttgtcggcattcttttttgttttattagttgaaaatatagtgaaaaagttgcctaaatatgtatgttaacaaattatttgtcgtaactttgcactccaaatctgtttttaacatatggcactagtgaaaccagtaacgttatacgatgtcgcagagtatgccggtgtctctaccgcgaccgtttccaacgtggtgaaccaggccagccacgtttctgcgaaaacgcgggaaaaagtggaagcggcgatggcggagctcaattacattcccaaccgcgtggcacaacaactggcgggcaaagcgtcgcataccattggcatgttgatcactgccagtaccaatcctttctattcagaactggtgcgtggcgttgaacgcagctgcttcgaacgcggttatagtctcgtcctttgcaataccgaaggcgatgaacagcggatgaatcgcaatctggaaacgctgatgcaaaaacgcgttgatggcttgctgttactgtgcaccgaaacgcatcaaccttcgcgtgaaatcatgcaacgttatccgacagtgcctactgtgatgatggactgggctccgttcgatggcgacagcgatcttattcaggataactcgttgctgggcggagacttagcaacgcaatatctgatcgataaaggtcatacccgtatcgcctgtattaccggcccgctggataaaactccggcgcgcctgcggttggaaggttatcgggcggcgatgaaacgtgcgggtctcaacattcctgatggctatgaagtcactggtgattttgaatttaacggcgggtttgacgctatgcgccaactgctatcacatccgctgcgtcctcaggccgtctttaccggaaatgacgctatggctgttggcgtttaccaggcgttatatcaggcagagttacaggttccgcaggatatcgcggtgattggctatgacgatatcgaactggcaagctttatgacgccaccattaaccactatccaccaaccgaaagatgaactgggggagctggcgattgatgtactcatccatcggataacccagccgacccttcagcaacaacgattacaacttactccgattctgatggaacgcggttcggcttagctggtgaaaagaaaaaccaccctggcgcccaatacgcaaaccgcctctccccgcgcgttggccgattcattaatgcagctggcacgacaggtttcccgactggaaagcgggcagtgagctttcctcggtaccaaattccagaaaagaggcctcccgaaaggggggccttttttcgttttggtcctacttgtgcctgttctatttccgaaccgaccgcttgtatgaatccatcaaaattcgttttctctatgttggattccttgttgctcatattgtgatgataatttctacaaatatagtcattggtaactatctatgaaactgtttgatacttttatagttgattaaacttgttcatggcatttgccttaatatcatccgctatgtcaatgtagggtttcatagctttgtagtcgctgtgtcccgtccatttcatgaccacctgtgccgggattccgagagccagcgcattgcagatgaatgtccttcttcctgcatgggtactgagcaaagcgtatttgggtgtgacttcatcaatacgttcatttcccttgtagtaggtttcccgtacaggctcgttgatttctgccagttcgcccagctctttcaggtaatcgttcatcttctggttgctgatgacgggcagagccatgtaattctcgaaatggatgtccttgtatttgtccagtatggctttgctgtatttgttcagttcaatcgtcaggctgtcggcagtcttgactgtggttatttcgatgtggtcggacttcacatcgcttcttttcagattgcgaacatccgaataccgcaaactcgtaaagcagcagaacaggaaaacatcacgcacacgttccaggtattgcttatccttgggtatctggtagtctttcagcttgttcagttcatcccaagtcaggaagattacttttttcgaggtggttttcagtttcggtttgaacgtatcgtatgcaatgttctgatgatgtcctttcttgaagctccagcgcaggaaccatttgaggaatcccatttgcttgccgatggtgctgtttctcatatccttggtgtcacgcaggaagttgacgtattcgttcaatccaaactcgttgaaatagttgaacgttgcatcctccttgaactctttgaggtggttcctcactgctgcaaatttttcataggtggatgccgtccagttattctggttaccgcactcttttacaaactcatcgaacacctcccaaaagctgacaggggcttcttccggctgttcttcgctggtgtctttcattctcatgttgaaagcttccttcaactgttgggtcgttggcatgacctcctgcacctcaaattccttgaaaatattctggatttcggcatagtatttcagcaagtccgtattgatttcggctgcactttgctttagcttgttggtacatccgctctttacccgctgcttatctgcatcccatttggctacgtcaatccggtagcccgttgtaaactcgatgcgttggctggcaaagatgacacgcatacggatgggtacgttctctacgattggcacaccgttctttttccggctctccaatgcaaaaatgatgttgcgcttgatattcataattgggtgcgtttgaaattctacacccaaatatacacccaattattgagatagcaaaagacatttagaaacatttacttttactctatattgtaatttacacttgattatcagtcgtttgcagtcttatgatattctgtgaaagtataagttcgagagcctgtctctccgcaaaaaacgctgaaaatcagcagattgcaaaacaaacaccctgttttacacccaagaatgtaaagtcggctgtttttgttttatttaagataatacaaccactacataataaaagagtagcgatattaaaagaatccgatgagaaaagactaatatttatctatccattcagtttgatttttcaggactttacatcgtcctgaaagtatttgttggtaccggtaccgaggacgcgtaaacatttacagttgcatgtggcctattgtttttagccgttaaatattttataactattaaatagcgatacaaattgttcgaaactaatattgtttatatcatatattctcgcatgttttaaagctttattaaattgattttttgtaaacagtttttcgtactctttgttaacccatttcattacaaaagtttcatatttttttctctctttaaatgccatttttgctggctttctttttaatacaattaatgtgctatccactttaggttttggatggaaataatacctaggaatttttgctaatatagaaatatctacctctgccattaacagcaatgctagtgatctgtttgtatctaataacattttagcaaaaccatattccactattaaataacttattgtggctgaactttcaaaaacaatttttcgaattatatttgtgcttatgttgtaaggtatgctgccaaatattttatatggattgtggctaggaaatgtaaatttcagtatatcatcatttactatttgatagttaggataatttaagagcttattacgagttacctcacataatttagaatcaatttctatcgccgttacaaaattacatctctttaccaatccagcagtaaaatgacctttccctgcacctatttcaaagatgttatctttttcatctaaacttatgcaattcattattttttctatgtgatattttgaagtaataaaattttgactatcttttatatttactttgttcattataacctctccttaatttattgcatctcttttcgaatatttatgttttttgagaaaagaacgtactcatggttcatcccgatatgcgtatcggtctgtatatcagcaactttctatgtgtttcaactacaatagtcatctattctcatctttctgagtccaccccctgcaaagcccctctttacgacataaaaattcggtcggaaaaggtatgcaaaagatgtttctctctttaagagaaactcttcgggatgcaaaaatatgaaaataactccaattcaccaaattatatagcgacttttttacaaaatgctaaaatttgttgatttccgtcaagcaattgttgagcaaaaatgtcttttacgataaaatgatacctcaatatcaactgtttagcaaaacgatatttctcttaaagagagaaacacctttttgttcaccaatccccgacttttaatcccgcggccatgattgaaaaaggaagagtatgagtattcaacatttccgtgtcgcccttattcccttttttgcggcattttgccttcctgtttttgctcacccagaaacgctggtgaaagtaaaagatgctgaagatcagttgggtgcacgagtgggttacatcgaactggatctcaacagcggtaagatccttgagagttttcgccccgaagaacgttttccaatgatgagcacttttaaagttctgctatgtggcgcggtattatcccgtattgacgccgggcaagagcaactcggtcgccgcatacactattctcagaatgacttggttgagtactcaccagtcacagaaaagcatcttacggatggcatgacagtaagagaattatgcagtgctgccataaccatgagtgataacactgcggccaacttacttctgacaacgatcggaggaccgaaggagctaaccgcttttttgcacaacatgggggatcatgtaactcgccttgatcgttgggaaccggagctgaatgaagccataccaaacgacgagcgtgacaccacgatgcctgtagcaatggcaacaacgttgcgcaaactattaactggcgaactacttactctagcttcccggcaacaattaatagactggatggaggcggataaagttgcaggaccacttctgcgctcggcccttccggctggctggtttattgctgataaatctggagccggtgagcgtgggtctcgcggtatcattgcagcactggggccagatggtaagccctcccgtatcgtagttatctacacgacggggagtcaggcaactatggatgaacgaaatagacagatcgctgagataggtgcctcactgattaagcattggtaactgtcagaccaagtttactcataacgcgtcaattcgagggggatcaattccgtgataggtgggctgcccttcctggttggcttggtttcatcagccatccgcttgccctcatctgttacgccggcggtagccggccagcctcgcagagcaggattcccgttgagcaccgccaggtgcgaataagggacagtgaagaaggaacacccgctcgcgggtgggcctacttcacctatcctgcccggctgacgccgttggatacaccaaggaaagtctacacgaaccctttggcaaaatcctgtatatcgtgcgaaaaaggatggatataccgaaaaaatcgctataatgaccccgaagcagggttatgcagcggaaaacggaattgatccggccacgatgcgtccggcgtagaggatctgaagatcagcagttcaacctgttgatagtacgtactaagctctcatgtttcacgtactaagctctcatgtttaacgtactaagctctcatgtttaacgaactaaaccctcatggctaacgtactaagctctcatggctaacgtactaagctctcatgtttcacgtactaagctctcatgtttgaacaataaaattaatataaatcagcaacttaaatagcctctaaggttttaagttttataagaaaaaaaagaatatataaggcttttaaagcttttaag

SEQ ID NO: 38 - DNA, 7084 bp, synthetic construct
  misc_feature 1..7084: note = Description of sequence: pBH108
  source 1..7084: mol_type = other DNA
gtttaacggttgtggacaacaagccagggatgtaacgcactgagaagcccttagagcctctcaaagcaattttgagtgacacaggaacacttaacggctgacatgggaattcccctccaccgcggtggtacaaagaaaattcgacaaactgttatttttctatctatttatttgaattaggagcgctcctaatttacctttgtcggcaattaggagcgctcctaattaaataaagatattctcgtcaaacaaatataaataatataaacatggtttttactctggaagattttgttggcgattggcgtcagaccgcgggttataatttggatcaagtcctggaacagggtggcgtaagctctctgttccagaacctgggtgtgagcgtgacgccgattcagcgcatcgttctgtccggcgagaacggtctgaaaattgatattcatgtgatcatcccgtacgaaggcctgagcggtgaccaaatgggtcaaatcgagaaaatctttaaagtcgtctacccagttgacgatcaccacttcaaggttatcttgcattacggtacgctggtgattgatggtgtgaccccgaatatgattgactatttcggccgtccgtatgaaggcattgccgtttttgacggtaaaaagatcaccgtcaccggtaccctgtggaatggcaataagattattgacgagcgtctgattaacccggacggcagcctgctgttccgcgtgaccatcaacggtgtcacgggttggcgtctgtgcgagcgcatcctggcataatgaactgcacttgctttgataattaatgataaacaatctaaaagcactctaatcgttatcggagtgcttttagattactaatcaaattgcttctactaattgcctatcttccagtgatggaacagcatttgtgcattggctgcaacaatcagccttgatctggaagaagcaatgaaagctgctgttaagtctccgaatcaggtattgttcctgacaggtgtattcccatccggtaaacgcggatactttgcagttgatctgactcaggaataaattataaattaaggtaagaagattgtaggataagctaatgaaatagaaaaaggatgccgtcacacaacttgtcggcattcttttttgttttattagttgaaaatatagtgaaaaagttgcctaaatatgtatgttaacaaattatttgtcgtaactttgcactccaaatctgtttttaacatatggcactagtgaaaccagtaacgttatacgatgtcgcagagtatgccggtgtctctaaaagcaccgtttccctggtggtgaaccaggccagccacgtttctgcgaaaacgcgggaaaaagtggaagcggcgatggcggagctcaattacattcccaaccgcgtggcacaacaactggcgggcaaagcgtcgcataccattggcatgttgatcactgccagtaccaatcctttctattcagaactggtgcgtggcgttgaacgcagctgcttcgaacgcggttatagtctcgtcctttgcaataccgaaggcgatgaacagcggatgaatcgcaatctggaaacgctgatgcaaaaacgcgttgatggcttgctgttactgtgcaccgaaacgcatcaaccttcgcgtgaaatcatgcaacgttatccgacagtgcctactgtgatgatggactgggctccgttcgatggcgacagcgatcttattcaggataactcgttgctgggcggagacttagcaacgcaatatctgatcgataaaggtcatacccgtatcgcctgtattaccggcccgctggataaaactccggcgcgcctgcggttggaaggttatcgggcggcgatgaaacgtgcgggtctcaacattcctgatggctatgaagtcactggtgattttgaatttaacggcgggtttgacgctatgcgccaactgctatcacatccgctgcgtcctcaggccgtctttaccggaaatgacgctatggctgttggcgtttaccaggcgttatatcaggcagagttacaggttccgcaggatatcgcggtgattggctatgacgatatcgaactggcaagctttatgacgccaccattaaccactatccaccaaccgaaagatgaactgggggagctggcgattgatgtactcatccatcggataacccagccgacccttcagcaacaacgattacaacttactccgattctgatggaacgcggttcggcttagctggtgaaaagaaaaaccaccctggcgcccaatacgcaaaccgcctctccccgcgcgttggccgattcattaatgcagctggcacgacaggtttcccgactggaaagcgggcagtgagctttcctcggtaccaaattccagaaaagaggcctcccgaaaggggggccttttttcgttttggtcctacttgtgcctgttctatttccgaaccgaccgcttgtatgaatccatcaaaattcgttttctctatgttggattccttgttgctcatattgtgatgataatttctacaaatatagtcattggtaactatctatgaaactgtttgatacttttatagttgattaaacttgttcatggcatttgccttaatatcatccgctatgtcaatgtagggtttcatagctttgtagtcgctgtgtcccgtccatttcatgaccacctgtgccgggattccgagagccagcgcattgcagatgaatgtccttcttcctgcatgggtactgagcaaagcgtatttgggtgtgacttcatcaatacgttcatttcccttgtagtaggtttcccgtacaggctcgttgatttctgccagttcgcccagctctttcaggtaatcgttcatcttctggttgctgatgacgggcagagccatgtaattctcgaaatggatgtccttgtatttgtccagtatggctttgctgtatttgttcagttcaatcgtcaggctgtcggcagtcttgactgtggttatttcgatgtggtcggacttcacatcgcttcttttcagattgcgaacatccgaataccgcaaactcgtaaagcagcagaacaggaaaacatcacgcacacgttccaggtattgcttatccttgggtatctggtagtctttcagcttgttcagttcatcccaagtcaggaagattacttttttcgaggtggttttcagtttcggtttgaacgtatcgtatgcaatgttctgatgatgtcctttcttgaagctccagcgcaggaaccatttgaggaatcccatttgcttgccgatggtgctgtttctcatatccttggtgtcacgcaggaagttgacgtattcgttcaatccaaactcgttgaaatagttgaacgttgcatcctccttgaactctttgaggtggttcctcactgctgcaaatttttcataggtggatgccgtccagttattctggttaccgcactcttttacaaactcatcgaacacctcccaaaagctgacaggggcttcttccggctgttcttcgctggtgtctttcattctcatgttgaaagcttccttcaactgttgggtcgttggcatgacctcctgcacctcaaattccttgaaaatattctggatttcggcatagtatttcagcaagtccgtattgatttcggctgcactttgctttagcttgttggtacatccgctctttacccgctgcttatctgcatcccatttggctacgtcaatccggtagcccgttgtaaactcgatgcgttggctggcaaagatgacacgcatacggatgggtacgttctctacgattggcacaccgttctttttccggctctccaatgcaaaaatgatgttgcgcttgatattcataattgggtgcgtttgaaattctacacccaaatatacacccaattattgagatagcaaaagacatttagaaacatttacttttactctatattgtaatttacacttgattatcagtcgtttgcagtcttatgatattctgtgaaagtataagttcgagagcctgtctctccgcaaaaaacgctgaaaatcagcagattgcaaaacaaacaccctgttttacacccaagaatgtaaagtcggctgtttttgttttatttaagataatacaaccactacataataaaagagtagcgatattaaaagaatccgatgagaaaagactaatatttatctatccattcagtttgatttttcaggactttacatcgtcctgaaagtatttgttggtaccggtaccgaggacgcgtaaacatttacagttgcatgtggcctattgtttttagccgttaaatattttataactattaaatagcgatacaaattgttcgaaactaatattgtttatatcatatattctcgcatgttttaaagctttattaaattgattttttgtaaacagtttttcgtactctttgttaacccatttcattacaaaagtttcatatttttttctctctttaaatgccatttttgctggctttctttttaatacaattaatgtgctatccactttaggttttggatggaaataatacctaggaatttttgctaatatagaaatatctacctctgccattaacagcaatgctagtgatctgtttgtatctaataacattttagcaaaaccatattccactattaaataacttattgtggctgaactttcaaaaacaatttttcgaattatatttgtgcttatgttgtaaggtatgctgccaaatattttatatggattgtggctaggaaatgtaaatttcagtatatcatcatttactatttgatagttaggataatttaagagcttattacgagttacctcacataatttagaatcaatttctatcgccgttacaaaattacatctctttaccaatccagcagtaaaatgacctttccctgcacctatttcaaagatgttatctttttcatctaaacttatgcaattcattattttttctatgtgatattttgaagtaataaaattttgactatcttttatatttactttgttcattataacctctccttaatttattgcatctcttttcgaatatttatgttttttgagaaaagaacgtactcatggttcatcccgatatgcgtatcggtctgtatatcagcaactttctatgtgtttcaactacaatagtcatctattctcatctttctgagtccaccccctgcaaagcccctctttacgacataaaaattcggtcggaaaaggtatgcaaaagatgtttctctctttaagagaaactcttcgggatgcaaaaatatgaaaataactccaattcaccaaattatatagcgacttttttacaaaatgctaaaatttgttgatttccgtcaagcaattgttgagcaaaaatgtcttttacgataaaatgatacctcaatatcaactgtttagcaaaacgatatttctcttaaagagagaaacacctttttgttcaccaatccccgacttttaatcccgcggccatgattgaaaaaggaagagtatgagtattcaacatttccgtgtcgcccttattcccttttttgcggcattttgccttcctgtttttgctcacccagaaacgctggtgaaagtaaaagatgctgaagatcagttgggtgcacgagtgggttacatcgaactggatctcaacagcggtaagatccttgagagttttcgccccgaagaacgttttccaatgatgagcacttttaaagttctgctatgtggcgcggtattatcccgtattgacgccgggcaagagcaactcggtcgccgcatacactattctcagaatgacttggttgagtactcaccagtcacagaaaagcatcttacggatggcatgacagtaagagaattatgcagtgctgccataaccatgagtgataacactgcggccaacttacttctgacaacgatcggaggaccgaaggagctaaccgcttttttgcacaacatgggggatcatgtaactcgccttgatcgttgggaaccggagctgaatgaagccataccaaacgacgagcgtgacaccacgatgcctgtagcaatggcaacaacgttgcgcaaactattaactggcgaactacttactctagcttcccggcaacaattaatagactggatggaggcggataaagttgcaggaccacttctgcgctcggcccttccggctggctggtttattgctgataaatctggagccggtgagcgtgggtctcgcggtatcattgcagcactggggccagatggtaagccctcccgtatcgtagttatctacacgacggggagtcaggcaactatggatgaacgaaatagacagatcgctgagataggtgcctcactgattaagcattggtaactgtcagaccaagtttactcataacgcgtcaattcgagggggatcaattccgtgataggtgggctgcccttcctggttggcttggtttcatcagccatccgcttgccctcatctgttacgccggcggtagccggccagcctcgcagagcaggattcccgttgagcaccgccaggtgcgaataagggacagtgaagaaggaacacccgctcgcgggtgggcctacttcacctatcctgcccggctgacgccgttggatacaccaaggaaagtctacacgaaccctttggcaaaatcctgtatatcgtgcgaaaaaggatggatataccgaaaaaatcgctataatgaccccgaagcagggttatgcagcggaaaacggaattgatccggccacgatgcgtccggcgtagaggatctgaagatcagcagttcaacctgttgatagtacgtactaagctctcatgtttcacgtactaagctctcatgtttaacgtactaagctctcatgtttaacgaactaaaccctcatggctaacgtactaagctctcatggctaacgtactaagctctcatgtttcacgtactaagctctcatgtttgaacaataaaattaatataaatcagcaacttaaatagcctctaaggttttaagttttataagaaaaaaaagaatatataaggcttttaaagcttttaag

SEQ ID NO: 39 - DNA, 7084 bp, synthetic construct
  misc_feature 1..7084: note = Description of sequence: pBH109
  source 1..7084: mol_type = other DNA
gtttaacggttgtggacaacaagccagggatgtaacgcactgagaagcccttagagcctctcaaagcaattttgagtgacacaggaacacttaacggctgacatgggaattcccctccaccgcggtggtacaaagaaaattcgacaaactgttatttttctatctatttatttgaattttgagcgctcaaaatttacctttgtcggcaattttgagcgctcaaaattaaataaagatattctcgtcaaacaaatataaataatataaacatggtttttactctggaagattttgttggcgattggcgtcagaccgcgggttataatttggatcaagtcctggaacagggtggcgtaagctctctgttccagaacctgggtgtgagcgtgacgccgattcagcgcatcgttctgtccggcgagaacggtctgaaaattgatattcatgtgatcatcccgtacgaaggcctgagcggtgaccaaatgggtcaaatcgagaaaatctttaaagtcgtctacccagttgacgatcaccacttcaaggttatcttgcattacggtacgctggtgattgatggtgtgaccccgaatatgattgactatttcggccgtccgtatgaaggcattgccgtttttgacggtaaaaagatcaccgtcaccggtaccctgtggaatggcaataagattattgacgagcgtctgattaacccggacggcagcctgctgttccgcgtgaccatcaacggtgtcacgggttggcgtctgtgcgagcgcatcctggcataatgaactgcacttgctttgataattaatgataaacaatctaaaagcactctaatcgttatcggagtgcttttagattactaatcaaattgcttctactaattgcctatcttccagtgatggaacagcatttgtgcattggctgcaacaatcagccttgatctggaagaagcaatgaaagctgctgttaagtctccgaatcaggtattgttcctgacaggtgtattcccatccggtaaacgcggatactttgcagttgatctgactcaggaataaattataaattaaggtaagaagattgtaggataagctaatgaaatagaaaaaggatgccgtcacacaacttgtcggcattcttttttgttttattagttgaaaatatagtgaaaaagttgcctaaatatgtatgttaacaaattatttgtcgtaactttgcactccaaatctgtttttaacatatggcactagtgaaaccagtaacgttatacgatgtcgcagagtatgccggtgtctctcatcagaccgtttccaatgtggtgaaccaggccagccacgtttctgcgaaaacgcgggaaaaagtggaagcggcgatggcggagctcaattacattcccaaccgcgtggcacaacaactggcgggcaaagcgtcgcataccattggcatgttgatcactgccagtaccaatcctttctattcagaactggtgcgtggcgttgaacgcagctgcttcgaacgcggttatagtctcgtcctttgcaataccgaaggcgatgaacagcggatgaatcgcaatctggaaacgctgatgcaaaaacgcgttgatggcttgctgttactgtgcaccgaaacgcatcaaccttcgcgtgaaatcatgcaacgttatccgacagtgcctactgtgatgatggactgggctccgttcgatggcgacagcgatcttattcaggataactcgttgctgggcggagacttagcaacgcaatatctgatcgataaaggtcatacccgtatcgcctgtattaccggcccgctggataaaactccggcgcgcctgcggttggaaggttatcgggcggcgatgaaacgtgcgggtctcaacattcctgatggctatgaagtcactggtgattttgaatttaacggcgggtttgacgctatgcgccaactgctatcacatccgctgcgtcctcaggccgtctttaccggaaatgacgctatggctgttggcgtttaccaggcgttatatcaggcagagttacaggttccgcaggatatcgcggtgattggctatgacgatatcgaactggcaagctttatgacgccaccattaaccactatccaccaaccgaaagatgaactgggggagctggcgattgatgtactcatccatcggataacccagccgacccttcagcaacaacgattacaacttactccgattctgatggaacgcggttcggcttagctggtgaaaagaaaaaccaccctggcgcccaatacgcaaaccgcctctccccgcgcgttggccgattcattaatgcagctggcacgacaggtttcccgactggaaagcgggcagtgagctttcctcggtaccaaattccagaaaagaggcctcccgaaaggggggccttttttcgttttggtcctacttgtgcctgttctatttccgaaccgaccgcttgtatgaatccatcaaaattcgttttctctatgttggattccttgttgctcatattgtgatgataatttctacaaatatagtcattggtaactatctatgaaactgtttgatacttttatagttgattaaacttgttcatggcatttgccttaatatcatccgctatgtcaatgtagggtttcatagctttgtagtcgctgtgtcccgtccatttcatgaccacctgtgccgggattccgagagccagcgcattgcagatgaatgtccttcttcctgcatgggtactgagcaaagcgtatttgggtgtgacttcatcaatacgttcatttcccttgtagtaggtttcccgtacaggctcgttgatttctgccagttcgcccagctctttcaggtaatcgttcatcttctggttgctgatgacgggcagagccatgtaattctcgaaatggatgtccttgtatttgtccagtatggctttgctgtatttgttcagttcaatcgtcaggctgtcggcagtcttgactgtggttatttcgatgtggtcggacttcacatcgcttcttttcagattgcgaacatccgaataccgcaaactcgtaaagcagcagaacaggaaaacatcacgcacacgttccaggtattgcttatccttgggtatctggtagtctttcagcttgttcagttcatcccaagtcaggaagattacttttttcgaggtggttttcagtttcggtttgaacgtatcgtatgcaatgttctgatgatgtcctttcttgaagctccagcgcaggaaccatttgaggaatcccatttgcttgccgatggtgctgtttctcatatccttggtgtcacgcaggaagttgacgtattcgttcaatccaaactcgttgaaatagttgaacgttgcatcctccttgaactctttgaggtggttcctcactgctgcaaatttttcataggtggatgccgtccagttattctggttaccgcactcttttacaaactcatcgaacacctcccaaaagctgacaggggcttcttccggctgttcttcgctggtgtctttcattctcatgttgaaagcttccttcaactgttgggtcgttggcatgacctcctgcacctcaaattccttgaaaatattctggatttcggcatagtatttcagcaagtccgtattgatttcggctgcactttgctttagcttgttggtacatccgctctttacccgctgcttatctgcatcccatttggctacgtcaatccggtagcccgttgtaaactcgatgcgttggctggcaaagatgacacgcatacggatgggtacgttctctacgattggcacaccgttctttttccggctctccaatgcaaaaatgatgttgcgcttgatattcataattgggtgcgtttgaaattctacacccaaatatacacccaattattgagatagcaaaagacatttagaaacatttacttttactctatattgtaatttacacttgattatcagtcgtttgcagtcttatgatattctgtgaaagtataagttcgagagcctgtctctccgcaaaaaacgctgaaaatcagcagattgcaaaacaaacaccctgttttacacccaagaatgtaaagtcggctgtttttgttttatttaagataatacaaccactacataataaaagagtagcgatattaaaagaatccgatgagaaaagactaatatttatctatccattcagtttgatttttcaggactttacatcgtcctgaaagtatttgttggtaccggtaccgaggacgcgtaaacatttacagttgcatgtggcctattgtttttagccgttaaatattttataactattaaatagcgatacaaattgttcgaaactaatattgtttatatcatatattctcgcatgttttaaagctttattaaattgattttttgtaaacagtttttcgtactctttgttaacccatttcattacaaaagtttcatatttttttctctctttaaatgccatttttgctggctttctttttaatacaattaatgtgctatccactttaggttttggatggaaataatacctaggaatttttgctaatatagaaatatctacctctgccattaacagcaatgctagtgatctgtttgtatctaataacattttagcaaaaccatattccactattaaataacttattgtggctgaactttcaaaaacaatttttcgaattatatttgtgcttatgttgtaaggtatgctgccaaatattttatatggattgtggctaggaaatgtaaatttcagtatatcatcatttactatttgatagttaggataatttaagagcttattacgagttacctcacataatttagaatcaatttctatcgccgttacaaaattacatctctttaccaatccagcagtaaaatgacctttccctgcacctatttcaaagatgttatctttttcatctaaacttatgcaattcattattttttctatgtgatattttgaagtaataaaattttgactatcttttatatttactttgttcattataacctctccttaatttattgcatctcttttcgaatatttatgttttttgagaaaagaacgtactcatggttcatcccgatatgcgtatcggtctgtatatcagcaactttctatgtgtttcaactacaatagtcatctattctcatctttctgagtccaccccctgcaaagcccctctttacgacataaaaattcggtcggaaaaggtatgcaaaagatgtttctctctttaagagaaactcttcgggatgcaaaaatatgaaaataactccaattcaccaaattatatagcgacttttttacaaaatgctaaaatttgttgatttccgtcaagcaattgttgagcaaaaatgtcttttacgataaaatgatacctcaatatcaactgtttagcaaaacgatatttctcttaaagagagaaacacctttttgttcaccaatccccgacttttaatcccgcggccatgattgaaaaaggaagagtatgagtattcaacatttccgtgtcgcccttattcccttttttgcggcattttgccttcctgtttttgctcacccagaaacgctggtgaaagtaaaagatgctgaagatcagttgggtgcacgagtgggttacatcgaactggatctcaacagcggtaagatccttgagagttttcgccccgaagaacgttttccaatgatgagcacttttaaagttctgctatgtggcgcggtattatcccgtattgacgccgggcaagagcaactcggtcgccgcatacactattctcagaatgacttggttgagtactcaccagtcacagaaaagcatcttacggatggcatgacagtaagagaattatgcagtgctgccataaccatgagtgataacactgcggccaacttacttctgacaacgatcggaggaccgaaggagctaaccgcttttttgcacaacatgggggatcatgtaactcgccttgatcgttgggaaccggagctgaatgaagccataccaaacgacgagcgtgacaccacgatgcctgtagcaatggcaacaacgttgcgcaaactattaactggcgaactacttactctagcttcccggcaacaattaatagactggatggaggcggataaagttgcaggaccacttctgcgctcggcccttccggctggctggtttattgctgataaatctggagccggtgagcgtgggtctcgcggtatcattgcagcactggggccagatggtaagccctcccgtatcgtagttatctacacgacggggagtcaggcaactatggatgaacgaaatagacagatcgctgagataggtgcctcactgattaagcattggtaactgtcagaccaagtttactcataacgcgtcaattcgagggggatcaattccgtgataggtgggctgcccttcctggttggcttggtttcatcagccatccgcttgccctcatctgttacgccggcggtagccggccagcctcgcagagcaggattcccgttgagcaccgccaggtgcgaataagggacagtgaagaaggaacacccgctcgcgggtgggcctacttcacctatcctgcccggctgacgccgttggatacaccaaggaaagtctacacgaaccctttggcaaaatcctgtatatcgtgcgaaaaaggatggatataccgaaaaaatcgctataatgaccccgaagcagggttatgcagcggaaaacggaattgatccggccacgatgcgtccggcgtagaggatctgaagatcagcagttcaacctgttgatagtacgtactaagctctcatgtttcacgtactaagctctcatgtttaacgtactaagctctcatgtttaacgaactaaaccctcatggctaacgtactaagctctcatggctaacgtactaagctctcatgtttcacgtactaagctctcatgtttgaacaataaaattaatataaatcagcaacttaaatagcctctaaggttttaagttttataagaaaaaaaagaatatataaggcttttaaagcttttaag

SEQ ID NO: 40 - DNA, 7084 bp, synthetic construct
  misc_feature 1..7084: note = Description of sequence: pBH110
  source 1..7084: mol_type = other DNA
gtttaacggttgtggacaacaagccagggatgtaacgcactgagaagcccttagagcctctcaaagcaattttgagtgacacaggaacacttaacggctgacatgggaattcccctccaccgcggtggtacaaagaaaattcgacaaactgttatttttctatctatttatttgaattgacagcgctgtcaatttacctttgtcggcaattgacagcgctgtcaattaaataaagatattctcgtcaaacaaatataaataatataaacatggtttttactctggaagattttgttggcgattggcgtcagaccgcgggttataatttggatcaagtcctggaacagggtggcgtaagctctctgttccagaacctgggtgtgagcgtgacgccgattcagcgcatcgttctgtccggcgagaacggtctgaaaattgatattcatgtgatcatcccgtacgaaggcctgagcggtgaccaaatgggtcaaatcgagaaaatctttaaagtcgtctacccagttgacgatcaccacttcaaggttatcttgcattacggtacgctggtgattgatggtgtgaccccgaatatgattgactatttcggccgtccgtatgaaggcattgccgtttttgacggtaaaaagatcaccgtcaccggtaccctgtggaatggcaataagattattgacgagcgtctgattaacccggacggcagcctgctgttccgcgtgaccatcaacggtgtcacgggttggcgtctgtgcgagcgcatcctggcataatgaactgcacttgctttgataattaatgataaacaatctaaaagcactctaatcgttatcggagtgcttttagattactaatcaaattgcttctactaattgcctatcttccagtgatggaacagcatttgtgcattggctgcaacaatcagccttgatctggaagaagcaatgaaagctgctgttaagtctccgaatcaggtattgttcctgacaggtgtattcccatccggtaaacgcggatactttgcagttgatctgactcaggaataaattataaattaaggtaagaagattgtaggataagctaatgaaatagaaaaaggatgccgtcacacaacttgtcggcattcttttttgttttattagttgaaaatatagtgaaaaagttgcctaaatatgtatgttaacaaattatttgtcgtaactttgcactccaaatctgtttttaacatatggcactagtgaaaccagtaacgttatacgatgtcgcagagtatgccggtgtctctggaaagaccgtttcccgcgtggtgaaccaggccagccacgtttctgcgaaaacgcgggaaaaagtggaagcggcgatggcggagctcaattacattcccaaccgcgtggcacaacaactggcgggcaaagcgtcgcataccattggcatgttgatcactgccagtaccaatcctttctattcagaactggtgcgtggcgttgaacgcagctgcttcgaacgcggttatagtctcgtcctttgcaataccgaaggcgatgaacagcggatgaatcgcaatctggaaacgctgatgcaaaaacgcgttgatggcttgctgttactgtgcaccgaaacgcatcaaccttcgcgtgaaatcatgcaacgttatccgacagtgcctactgtgatgatggactgggctccgttcgatggcgacagcgatcttattcaggataactcgttgctgggcggagacttagcaacgcaatatctgatcgataaaggtcatacccgtatcgcctgtattaccggcccgctggataaaactccggcgcgcctgcggttggaaggttatcgggcggcgatgaaacgtgcgggtctcaacattcctgatggctatgaagtcactggtgattttgaatttaacggcgggtttgacgctatgcgccaactgctatcacatccgctgcgtcctcaggccgtctttaccggaaatgacgctatggctgttggcgtttaccaggcgttatatcaggcagagttacaggttccgcaggatatcgcggtgattggctatgacgatatcgaactggcaagctttatgacgccaccattaaccactatccaccaaccgaaagatgaactgggggagctggcgattgatgtactcatccatcggataacccagccgacccttcagcaacaacgattacaacttactccgattctgatggaacgcggttcggcttagctggtgaaaagaaaaaccaccctggcgcccaatacgcaaaccgcctctccccgcgcgttggccgattcattaatgcagctggcacgacaggtttcccgactggaaagcgggcagtgagctttcctcggtaccaaattccagaaaagaggcctcccgaaaggggggccttttttcgttttggtcctacttgtgcctgttctatttccgaaccgaccgcttgtatgaatccatcaaaattcgttttctctatgttggattccttgttgctcatattgtgatgataatttctacaaatatagtcattggtaactatctatgaaactgtttgatacttttatagttgattaaacttgttcatggcatttgccttaatatcatccgctatgtcaatgtagggtttcatagctttgtagtcgctgtgtcccgtccatttcatgaccacctgtgccgggattccgagagccagcgcattgcagatgaatgtccttcttcctgcatgggtactgagcaaagcgtatttgggtgtgacttcatcaatacgttcatttcccttgtagtaggtttcccgtacaggctcgttgatttctgccagttcgcccagctctttcaggtaatcgttcatcttctggttgctgatgacgggcagagccatgtaattctcgaaatggatgtccttgtatttgtccagtatggctttgctgtatttgttcagttcaatcgtcaggctgtcggcagtcttgactgtggttatttcgatgtggtcggacttcacatcgcttcttttcagattgcgaacatccgaataccgcaaactcgtaaagcagcagaacaggaaaacatcacgcacacgttccaggtattgcttatccttgggtatctggtagtctttcagcttgttcagttcatcccaagtcaggaagattacttttttcgaggtggttttcagtttcggtttgaacgtatcgtatgcaatgttctgatgatgtcctttcttgaagctccagcgcaggaaccatttgaggaatcccatttgcttgccgatggtgctgtttctcatatccttggtgtcacgcaggaagttgacgtattcgttcaatccaaactcgttgaaatagttgaacgttgcatcctccttgaactctttgaggtggttcctcactgctgcaaatttttcataggtggatgccgtccagttattctggttaccgcactcttttacaaactcatcgaacacctcccaaaagctgacaggggcttcttccggctgttcttcgctggtgtctttcattctcatgttgaaagcttccttcaactgttgggtcgttggcatgacctcctgcacctcaaattccttgaaaatattctggatttcggcatagtatttcagcaagtccgtattgatttcggctgcactttgctttagcttgttggtacatccgctctttacccgctgcttatctgcatcccatttggctacgtcaatccggtagcccgttgtaaactcgatgcgttggctggcaaagatgacacgcatacggatgggtacgttctctacgattggcacaccgttctttttccggctctccaatgcaaaaatgatgttgcgcttgatattcataattgggtgcgtttgaaattctacacccaaatatacacccaattattgagatagcaaaagacatttagaaacatttacttttactctatattgtaatttacacttgattatcagtcgtttgcagtcttatgatattctgtgaaagtataagttcgagagcctgtctctccgcaaaaaacgctgaaaatcagcagattgcaaaacaaacaccctgttttacacccaagaatgtaaagtcggctgtttttgttttatttaagataatacaaccactacataataaaagagtagcgatattaaaagaatccgatgagaaaagactaatatttatctatccattcagtttgatttttcaggactttacatcgtcctgaaagtatttgttggtaccggtaccgaggacgcgtaaacatttacagttgcatgtggcctattgtttttagccgttaaatattttataactattaaatagcgatacaaattgttcgaaactaatattgtttatatcatatattctcgcatgttttaaagctttattaaattgattttttgtaaacagtttttcgtactctttgttaacccatttcattacaaaagtttcatatttttttctctctttaaatgccatttttgctggctttctttttaatacaattaatgtgctatccactttaggttttggatggaaataatacctaggaatttttgctaatatagaaatatctacctctgccattaacagcaatgctagtgatctgtttgtatctaataacattttagcaaaaccatattccactattaaataacttattgtggctgaactttcaaaaacaatttttcgaattatatttgtgcttatgttgtaaggtatgctgccaaatattttatatggattgtggctaggaaatgtaaatttcagtatatcatcatttactatttgatagttaggataatttaagagcttattacgagttacctcacataatttagaatcaatttctatcgccgttacaaaattacatctctttaccaatccagcagtaaaatgacctttccctgcacctatttcaaagatgttatctttttcatctaaacttatgcaattcattattttttctatgtgatattttgaagtaataaaattttgactatcttttatatttactttgttcattataacctctccttaatttattgcatctcttttcgaatatttatgttttttgagaaaagaacgtactcatggttcatcccgatatgcgtatcggtctgtatatcagcaactttctatgtgtttcaactacaatagtcatctattctcatctttctgagtccaccccctgcaaagcccctctttacgacataaaaattcggtcggaaaaggtatgcaaaagatgtttctctctttaagagaaactcttcgggatgcaaaaatatgaaaataactccaattcaccaaattatatagcgacttttttacaaaatgctaaaatttgttgatttccgtcaagcaattgttgagcaaaaatgtcttttacgataaaatgatacctcaatatcaactgtttagcaaaacgatatttctcttaaagagagaaacacctttttgttcaccaatccccgacttttaatcccgcggccatgattgaaaaaggaagagtatgagtattcaacatttccgtgtcgcccttattcccttttttgcggcattttgccttcctgtttttgctcacccagaaacgctggtgaaagtaaaagatgctgaagatcagttgggtgcacgagtgggttacatcgaactggatctcaacagcggtaagatccttgagagttttcgccccgaagaacgttttccaatgatgagcacttttaaagttctgctatgtggcgcggtattatcccgtattgacgccgggcaagagcaactcggtcgccgcatacactattctcagaatgacttggttgagtactcaccagtcacagaaaagcatcttacggatggcatgacagtaagagaattatgcagtgctgccataaccatgagtgataacactgcggccaacttacttctgacaacgatcggaggaccgaaggagctaaccgcttttttgcacaacatgggggatcatgtaactcgccttgatcgttgggaaccggagctgaatgaagccataccaaacgacgagcgtgacaccacgatgcctgtagcaatggcaacaacgttgcgcaaactattaactggcgaactacttactctagcttcccggcaacaattaatagactggatggaggcggataaagttgcaggaccacttctgcgctcggcccttccggctggctggtttattgctgataaatctggagccggtgagcgtgggtctcgcggtatcattgcagcactggggccagatggtaagccctcccgtatcgtagttatctacacgacggggagtcaggcaactatggatgaacgaaatagacagatcgctgagataggtgcctcactgattaagcattggtaactgtcagaccaagtttactcataacgcgtcaattcgagggggatcaattccgtgataggtgggctgcccttcctggttggcttggtttcatcagccatccgcttgccctcatctgttacgccggcggtagccggccagcctcgcagagcaggattcccgttgagcaccgccaggtgcgaataagggacagtgaagaaggaacacccgctcgcgggtgggcctacttcacctatcctgcccggctgacgccgttggatacaccaaggaaagtctacacgaaccctttggcaaaatcctgtatatcgtgcgaaaaaggatggatataccgaaaaaatcgctataatgaccccgaagcagggttatgcagcggaaaacggaattgatccggccacgatgcgtccggcgtagaggatctgaagatcagcagttcaacctgttgatagtacgtactaagctctcatgtttcacgtactaagctctcatgtttaacgtactaagctctcatgtttaacgaactaaaccctcatggctaacgtactaagctctcatggctaacgtactaagctctcatgtttcacgtactaagctctcatgtttgaacaataaaattaatataaatcagcaacttaaatagcctctaaggttttaagttttataagaaaaaaaagaatatataaggcttttaaagcttttaag

SEQ ID NO: 41 - DNA, 7052 bp, synthetic construct
  misc_feature 1..7052: note = Description of sequence: pBH111
  source 1..7052: mol_type = other DNA
gtttaacggttgtggacaacaagccagggatgtaacgcactgagaagcccttagagcctctcaaagcaattttgagtgacacaggaacacttaacggctgacatgggaattcccctccaccgcggtggtacaaagaaaattcgacaaactgttatttttctatctatttatttgaattgtgagcggataacaattacctttgtcggcaattgtgagcggataacaattaaataaagatattctcgtcaaacaaatataaataatataaacatggtttttactctggaagattttgttggcgattggcgtcagaccgcgggttataatttggatcaagtcctggaacagggtggcgtaagctctctgttccagaacctgggtgtgagcgtgacgccgattcagcgcatcgttctgtccggcgagaacggtctgaaaattgatattcatgtgatcatcccgtacgaaggcctgagcggtgaccaaatgggtcaaatcgagaaaatctttaaagtcgtctacccagttgacgatcaccacttcaaggttatcttgcattacggtacgctggtgattgatggtgtgaccccgaatatgattgactatttcggccgtccgtatgaaggcattgccgtttttgacggtaaaaagatcaccgtcaccggtaccctgtggaatggcaataagattattgacgagcgtctgattaacccggacggcagcctgctgttccgcgtgaccatcaacggtgtcacgggttggcgtctgtgcgagcgcatcctggcataatgaactgcacttgctttgataattaatgataaacaatctaaaagcactctaatcgttatcggagtgcttttagattactaatcaaattgcttctactaattgcctatcttccagtgatggaacagcatttgtgcattggctgcaacaatcagccttgatctggaagaagcaatgaaagctgctgttaagtctccgaatcaggtattgttcctgacaggtgtattcccatccggtaaacgcggatactttgcagttgatctgactcaggaataaattataaattaaggtaagaagattgtaggataagctaatgaaatagaaaaaggatgccgtcacacaacttgtcggcattcttttttgttttattagttgaaaatatagtgaaaaagttgcctaaatatgtatgttaacaaattatttgtcgtaactttgcactccaaatctgtttttaacatatggcactagtgaaaccagtaacgttatacgatgtcgcagagtatgccggtgtctcttatcagaccgtttcccgcgtggtgaaccaggccagccacgtttctgcgaaaacgcgggaaaaagtggaagcggcgatggcggagctgaattacattcccaaccgcgtggcacaacaactggcgggcaaacagtcgttgctgattggcgttgccacctccagtctggccctgcacgcgctgtcgcaaattgtcgcggcgattaaatctcgcgcctatcaactgggtgccagcgtgttcgtgtcgatggtagaacgaagcggcatcgaagcctgtaaaacggcggtgcacaatcttctcgcgcaacgcgtcagtgggctgatcattaactatccgctggataaccaggatgccattgctgtggaagctgcctgcactaatgttccggcgttatttcttgatgtctctgaccagacacccatcaacagtattattttctcccatgaagacggtacgcgactgggcgtggagcatctggtcgcattgggtcaccagcaaatcgcgctgttagcgggcccattaagttctgtctcggcgcgtctgcgtctggctggctggcataaatatctcactcgcaatcaaattcagccgatagcggaacgggaaggcgactggagtgccatgtccggttttcaacaaaccatgcaaatgctgaatgagggcatcgttcccactgcgatgctggttgccaacgatcagatggcgctgggcgcaatgcgcgccattaccgagaccgggctgcgcgttggtgcggatatctcggtagtgggatacgacgataccgaagacagctcatgttatatcccgccgttaaccaccatcaaacaggattttcgcctgctggggcaaaccagcgtggaccgcttgctgcaactctctcagggccaggcggtgaagggcaatcagctgttgcccgtctcactggtgaaaagaaaaaccaccctggcgcccaatacgcaaaccgcctctccccgcgcgttggccgattcattaatgcagctggcacgacaggtttcccgactggaaagcgggcagtgagctttcctcggtaccaaattccagaaaagaggcctcccgaaaggggggccttttttcgttttggtcctacttgtgcctgttctatttccgaaccgaccgcttgtatgaatccatcaaaattcgttttctctatgttggattccttgttgctcatattgtgatgataatttctacaaatatagtcattggtaactatctatgaaactgtttgatacttttatagttgattaaacttgttcatggcatttgccttaatatcatccgctatgtcaatgtagggtttcatagctttgtagtcgctgtgtcccgtccatttcatgaccacctgtgccgggattccgagagccagcgcattgcagatgaatgtccttcttcctgcatgggtactgagcaaagcgtatttgggtgtgacttcatcaatacgttcatttcccttgtagtaggtttcccgtacaggctcgttgatttctgccagttcgcccagctctttcaggtaatcgttcatcttctggttgctgatgacgggcagagccatgtaattctcgaaatggatgtccttgtatttgtccagtatggctttgctgtatttgttcagttcaatcgtcaggctgtcggcagtcttgactgtggttatttcgatgtggtcggacttcacatcgcttcttttcagattgcgaacatccgaataccgcaaactcgtaaagcagcagaacaggaaaacatcacgcacacgttccaggtattgcttatccttgggtatctggtagtctttcagcttgttcagttcatcccaagtcaggaagattacttttttcgaggtggttttcagtttcggtttgaacgtatcgtatgcaatgttctgatgatgtcctttcttgaagctccagcgcaggaaccatttgaggaatcccatttgcttgccgatggtgctgtttctcatatccttggtgtcacgcaggaagttgacgtattcgttcaatccaaactcgttgaaatagttgaacgttgcatcctccttgaactctttgaggtggttcctcactgctgcaaatttttcataggtggatgccgtccagttattctggttaccgcactcttttacaaactcatcgaacacctcccaaaagctgacaggggcttcttccggctgttcttcgctggtgtctttcattctcatgttgaaagcttccttcaactgttgggtcgttggcatgacctcctgcacctcaaattccttgaaaatattctggatttcggcatagtatttcagcaagtccgtattgatttcggctgcactttgctttagcttgttggtacatccgctctttacccgctgcttatctgcatcccatttggctacgtcaatccggtagcccgttgtaaactcgatgcgttggctggcaaagatgacacgcatacggatgggtacgttctctacgattggcacaccgttctttttccggctctccaatgcaaaaatgatgttgcgcttgatattcataattgggtgcgtttgaaattctacacccaaatatacacccaattattgagatagcaaaagacatttagaaacatttacttttactctatattgtaatttacacttgattatcagtcgtttgcagtcttatgatattctgtgaaagtataagttcgagagcctgtctctccgcaaaaaacgctgaaaatcagcagattgcaaaacaaacaccctgttttacacccaagaatgtaaagtcggctgtttttgttttatttaagataatacaaccactacataataaaagagtagcgatattaaaagaatccgatgagaaaagactaatatttatctatccattcagtttgatttttcaggactttacatcgtcctgaaagtatttgttggtaccggtaccgaggacgcgtaaacatttacagttgcatgtggcctattgtttttagccgttaaatattttataactattaaatagcgatacaaattgttcgaaactaatattgtttatatcatatattctcgcatgttttaaagctttattaaattgattttttgtaaacagtttttcgtactctttgttaacccatttcattacaaaagtttcatatttttttctctctttaaatgccatttttgctggctttctttttaatacaattaatgtgctatccactttaggttttggatggaaataatacctaggaatttttgctaatatagaaatatctacctctgccattaacagcaatgctagtgatctgtttgtatctaataacattttagcaaaaccatattccactattaaataacttattgtggctgaactttcaaaaacaatttttcgaattatatttgtgcttatgttgtaaggtatgctgccaaatattttatatggattgtggctaggaaatgtaaatttcagtatatcatcatttactatttgatagttaggataatttaagagcttattacgagttacctcacataatttagaatcaatttctatcgccgttacaaaattacatctctttaccaatccagcagtaaaatgacctttccctgcacctatttcaaagatgttatctttttcatctaaacttatgcaattcattattttttctatgtgatattttgaagtaataaaattttgactatcttttatatttactttgttcattataacctctccttaatttattgcatctcttttcgaatatttatgttttttgagaaaagaacgtactcatggttcatcccgatatgcgtatcggtctgtatatcagcaactttctatgtgtttcaactacaatagtcatctattctcatctttctgagtccaccccctgcaaagcccctctttacgacataaaaattcggtcggaaaaggtatgcaaaagatgtttctctctttaagagaaactcttcgggatgcaaaaatatgaaaataactccaattcaccaaattatatagcgacttttttacaaaatgctaaaatttgttgatttccgtcaagcaattgttgagcaaaaatgtcttttacgataaaatgatacctcaatatcaactgtttagcaaaacgatatttctcttaaagagagaaacacctttttgttcaccaatccccgacttttaatcccgcggccatgattgaaaaaggaagagtatgagtattcaacatttccgtgtcgcccttattcccttttttgcggcattttgccttcctgtttttgctcacccagaaacgctggtgaaagtaaaagatgctgaagatcagttgggtgcacgagtgggttacatcgaactggatctcaacagcggtaagatccttgagagttttcgccccgaagaacgttttccaatgatgagcacttttaaagttctgctatgtggcgcggtattatcccgtattgacgccgggcaagagcaactcggtcgccgcatacactattctcagaatgacttggttgagtactcaccagtcacagaaaagcatcttacggatggcatgacagtaagagaattatgcagtgctgccataaccatgagtgataacactgcggccaacttacttctgacaacgatcggaggaccgaaggagctaaccgcttttttgcacaacatgggggatcatgtaactcgccttgatcgttgggaaccggagctgaatgaagccataccaaacgacgagcgtgacaccacgatgcctgtagcaatggcaacaacgttgcgcaaactattaactggcgaactacttactctagcttcccggcaacaattaatagactggatggaggcggataaagttgcaggaccacttctgcgctcggcccttccggctggctggtttattgctgataaatctggagccggtgagcgtgggtctcgcggtatcattgcagcactggggccagatggtaagccctcccgtatcgtagttatctacacgacggggagtcaggcaactatggatgaacgaaatagacagatcgctgagataggtgcctcactgattaagcattggtaactgtcagaccaagtttactcataacgcgtcaattcgagggggatcaattccgtgataggtgggctgcccttcctggttggcttggtttcatcagccatccgcttgccctcatctgttacgccggcggtagccggccagcctcgcagagcaggattcccgttgagcaccgccaggtgcgaataagggacagtgaagaaggaacacccgctcgcgggtgggcctacttcacctatcctgcccggctgacgccgttggatacaccaaggaaagtctacacgaaccctttggcaaaatcctgtatatcgtgcgaaaaaggatggatataccgaaaaaatcgctataatgaccccgaagcagggttatgcagcggaaaacggaattgatccggccacgatgcgtccggcgtagaggatctgaagatcagcagttcaacctgttgatagtacgtactaagctctcatgtttcacgtactaagctctcatgtttaacgtactaagctctcatgtttaacgaactaaaccctcatggctaacgtactaagctctcatggctaacgtactaagctctcatgtttcacgtactaagctctcatgtttgaacaataaaattaatataaatcagcaacttaaatagcctctaaggttttaagttttataagaaaaaaaagaatatataaggcttttaaagcttttaag

SEQ ID NO: 42 - DNA, 7051 bp, synthetic construct
  misc_feature 1..7051: note = Description of sequence: pBH112
  source 1..7051: mol_type = other DNA
gtttaacggttgtggacaacaagccagggatgtaacgcactgagaagcccttagagcctctcaaagcaattttgagtgacacaggaacacttaacggctgacatgggaattcccctccaccgcggtggtacaaagaaaattcgacaaactgttatttttctatctatttatttgaattttaagcgcttaaaatttacctttgtcggcaattttaagcgcttaaaattaaataaagatattctcgtcaaacaaatataaataatataaacatggtttttactctggaagattttgttggcgattggcgtcagaccgcgggttataatttggatcaagtcctggaacagggtggcgtaagctctctgttccagaacctgggtgtgagcgtgacgccgattcagcgcatcgttctgtccggcgagaacggtctgaaaattgatattcatgtgatcatcccgtacgaaggcctgagcggtgaccaaatgggtcaaatcgagaaaatctttaaagtcgtctacccagttgacgatcaccacttcaaggttatcttgcattacggtacgctggtgattgatggtgtgaccccgaatatgattgactatttcggccgtccgtatgaaggcattgccgtttttgacggtaaaaagatcaccgtcaccggtaccctgtggaatggcaataagattattgacgagcgtctgattaacccggacggcagcctgctgttccgcgtgaccatcaacggtgtcacgggttggcgtctgtgcgagcgcatcctggcataatgaactgcacttgctttgataattaatgataaacaatctaaaagcactctaatcgttatcggagtgcttttagattactaatcaaattgcttctactaattgcctatcttccagtgatggaacagcatttgtgcattggctgcaacaatcagccttgatctggaagaagcaatgaaagctgctgttaagtctccgaatcaggtattgttcctgacaggtgtattcccatccggtaaacgcggatactttgcagttgatctgactcaggaataaattataaattaaggtaagaagattgtaggataagctaatgaaatagaaaaaggatgccgtcacacaacttgtcggcattcttttttgttttattagttgaaaatatagtgaaaaagttgcctaaatatgtatgttaacaaattatttgtcgtaactttgcactccaaatctgtttttaacatatggcactagtgaaaccagtaacgttatacgatgtcgcagagtatgccggtgtctctaccgcgaccgtttccaacgtggtgaaccaggccagccacgtttctgcgaaaacgcgggaaaaagtggaagcggcgatggcggagctgaattacattcccaaccgcgtggcacaacaactggcgggcaaacagtcgttgctgattggcgttgccacctccagtctggccctgcacgcgctgtcgcaaattgtcgcggcgattaaatctcgcgcctatcaactgggtgccagcgtgttcgtgtcgatggtagaacgaagcggcatcgaagcctgtaaaacggcggtgcacaatcttctcgcgcaacgcgtcagtgggctgatcattaactatccgctggataaccaggatgccattgctgtggaagctgcctgcactaatgttccggcgttatttcttgatgtctctgaccagacacccatcaacagtattattttctcccatgaagacggtacgcgactgggcgtggagcatctggtcgcattgggtcaccagcaaatcgcgctgttagcgggcccattaagttctgtctcggcgcgtctgcgtctggctggctggcataaatatctcactcgcaatcaaattcagccgatagcggaacgggaaggcgactggagtgccatgtccggttttcaacaaaccatgcaaatgctgaatgagggcatcgttcccactgcgatgctggttgccaacgatcagatggcgctgggcgcaatgcgcgccattaccgagaccgggctgcgcgttggtgcggatatctcggtagtgggatacgacgataccgaagacagctcatgttatatcccgccgttaaccaccatcaaacaggattttcgcctgctggggcaaaccagcgtggaccgcttgctgcaactctctcagggccaggcggtgaagggcaatcagctgttgcccgtctcactggtgaaaagaaaaaccaccctggcgcccaatacgcaaaccgcctctccccgcgcgttggccgattcattaatgcagctggcacgacaggtttcccgactggaaagcgggcagtgagctttcctcggtaccaaattccagaaaagaggcctcccgaaaggggggccttttttcgttttggtcctacttgtgcctgttctatttccgaaccgaccgcttgtatgaatccatcaaaattcgttttctctatgttggattccttgttgctcatattgtgatgataatttctacaaatatagtcattggtaactatctatgaaactgtttgatacttttatagttgattaaacttgttcatggcatttgccttaatatcatccgctatgtcaatgtagggtttcatagctttgtagtcgctgtgtcccgtccatttcatgaccacctgtgccgggattccgagagccagcgcattgcagatgaatgtccttcttcctgcatgggtactgagcaaagcgtatttgggtgtgacttcatcaatacgttcatttcccttgtagtaggtttcccgtacaggctcgttgatttctgccagttcgcccagctctttcaggtaatcgttcatcttctggttgctgatgacgggcagagccatgtaattctcgaaatggatgtccttgtatttgtccagtatggctttgctgtatttgttcagttcaatcgtcaggctgtcggcagtcttgactgtggttatttcgatgtggtcggacttcacatcgcttcttttcagattgcgaacatccgaataccgcaaactcgtaaagcagcagaacaggaaaacatcacgcacacgttccaggtattgcttatccttgggtatctggtagtctttcagcttgttcagttcatcccaagtcaggaagattacttttttcgaggtggttttcagtttcggtttgaacgtatcgtatgcaatgttctgatgatgtcctttcttgaagctccagcgcaggaaccatttgaggaatcccatttgcttgccgatggtgctgtttctcatatccttggtgtcacgcaggaagttgacgtattcgttcaatccaaactcgttgaaatagttgaacgttgcatcctccttgaactctttgaggtggttcctcactgctgcaaatttttcataggtggatgccgtccagttattctggttaccgcactcttttacaaactcatcgaacacctcccaaaagctgacaggggcttcttccggctgttcttcgctggtgtctttcattctcatgttgaaagcttccttcaactgttgggtcgttggcatgacctcctgcacctcaaattccttgaaaatattctggatttcggcatagtatttcagcaagtccgtattgatttcggctgcactttgctttagcttgttggtacatccgctctttacccgctgcttatctgcatcccatttggctacgtcaatccggtagcccgttgtaaactcgatgcgttggctggcaaagatgacacgcatacggatgggtacgttctctacgattggcacaccgttctttttccggctctccaatgcaaaaatgatgttgcgcttgatattcataattgggtgcgtttgaaattctacacccaaatatacacccaattattgagatagcaaaagacatttagaaacatttacttttactctatattgtaatttacacttgattatcagtcgtttgcagtcttatgatattctgtgaaagtataagttcgagagcctgtctctccgcaaaaaacgctgaaaatcagcagattgcaaaacaaacaccctgttttacacccaagaatgtaaagtcggctgtttttgttttatttaagataatacaaccactacataataaaagagtagcgatattaaaagaatccgatgagaaaagactaatatttatctatccattcagtttgatttttcaggactttacatcgtcctgaaagtatttgttggtaccggtaccgaggacgcgtaaacatttacagttgcatgtggcctattgtttttagccgttaaatattttataactattaaatagcgatacaaattgttcgaaactaatattgtttatatcatatattctcgcatgttttaaagctttattaaattgattttttgtaaacagtttttcgtactctttgttaacccatttcattacaaaagtttcatatttttttctctctttaaatgccatttttgctggctttctttttaatacaattaatgtgctatccactttaggttttggatggaaataatacctaggaatttttgctaatatagaaatatctacctctgccattaacagcaatgctagtgatctgtttgtatctaataacattttagcaaaaccatattccactattaaataacttattgtggctgaactttcaaaaacaatttttcgaattatatttgtgcttatgttgtaaggtatgctgccaaatattttatatggattgtggctaggaaatgtaaatttcagtatatcatcatttactatttgatagttaggataatttaagagcttattacgagttacctcacataatttagaatcaatttctatcgccgttacaaaattacatctctttaccaatccagcagtaaaatgacctttccctgcacctatttcaaagatgttatctttttcatctaaacttatgcaattcattattttttctatgtgatattttgaagtaataaaattttgactatcttttatatttactttgttcattataacctctccttaatttattgcatctcttttcgaatatttatgttttttgagaaaagaacgtactcatggttcatcccgatatgcgtatcggtctgtatatcagcaactttctatgtgtttcaactacaatagtcatctattctcatctttctgagtccaccccctgcaaagcccctctttacgacataaaaattcggtcggaaaaggtatgcaaaagatgtttctctctttaagagaaactcttcgggatgcaaaaatatgaaaataactccaattcaccaaattatatagcgacttttttacaaaatgctaaaatttgttgatttccgtcaagcaattgttgagcaaaaatgtcttttacgataaaatgatacctcaatatcaactgtttagcaaaacgatatttctcttaaagagagaaacacctttttgttcaccaatccccgacttttaatcccgcggccatgattgaaaaaggaagagtatgagtattcaacatttccgtgtcgcccttattcccttttttgcggcattttgccttcctgtttttgctcacccagaaacgctggtgaaagtaaaagatgctgaagatcagttgggtgcacgagtgggttacatcgaactggatctcaacagcggtaagatccttgagagttttcgccccgaagaacgttttccaatgatgagcacttttaaagttctgctatgtggcgcggtattatcccgtattgacgccgggcaagagcaactcggtcgccgcatacactattctcagaatgacttggttgagtactcaccagtcacagaaaagcatcttacggatggcatgacagtaagagaattatgcagtgctgccataaccatgagtgataacactgcggccaacttacttctgacaacgatcggaggaccgaaggagctaaccgcttttttgcacaacatgggggatcatgtaactcgccttgatcgttgggaaccggagctgaatgaagccataccaaacgacgagcgtgacaccacgatgcctgtagcaatggcaacaacgttgcgcaaactattaactggcgaactacttactctagcttcccggcaacaattaatagactggatggaggcggataaagttgcaggaccacttctgcgctcggcccttccggctggctggtttattgctgataaatctggagccggtgagcgtgggtctcgcggtatcattgcagcactggggccagatggtaagccctcccgtatcgtagttatctacacgacggggagtcaggcaactatggatgaacgaaatagacagatcgctgagataggtgcctcactgattaagcattggtaactgtcagaccaagtttactcataacgcgtcaattcgagggggatcaattccgtgataggtgggctgcccttcctggttggcttggtttcatcagccatccgcttgccctcatctgttacgccggcggtagccggccagcctcgcagagcaggattcccgttgagcaccgccaggtgcgaataagggacagtgaagaaggaacacccgctcgcgggtgggcctacttcacctatcctgcccggctgacgccgttggatacaccaaggaaagtctacacgaaccctttggcaaaatcctgtatatcgtgcgaaaaaggatggatataccgaaaaaatcgctataatgaccccgaagcagggttatgcagcggaaaacggaattgatccggccacgatgcgtccggcgtagaggatctgaagatcagcagttcaacctgttgatagtacgtactaagctctcatgtttcacgtactaagctctcatgtttaacgtactaagctctcatgtttaacgaactaaaccctcatggctaacgtactaagctctcatggctaacgtactaagctctcatgtttcacgtactaagctctcatgtttgaacaataaaattaatataaatcagcaacttaaatagcctctaaggttttaagttttataagaaaaaaaagaatatataaggcttttaaagcttttaag

SEQ ID NO: 43 - DNA, 7051 bp, synthetic construct
  misc_feature 1..7051: note = Description of sequence: pBH113
  source 1..7051: mol_type = other DNA
gtttaacggttgtggacaacaagccagggatgtaacgcactgagaagcccttagagcctctcaaagcaattttgagtgacacaggaacacttaacggctgacatgggaattcccctccaccgcggtggtacaaagaaaattcgacaaactgttatttttctatctatttatttgaattaggagcgctcctaatttacctttgtcggcaattaggagcgctcctaattaaataaagatattctcgtcaaacaaatataaataatataaacatggtttttactctggaagattttgttggcgattggcgtcagaccgcgggttataatttggatcaagtcctggaacagggtggcgtaagctctctgttccagaacctgggtgtgagcgtgacgccgattcagcgcatcgttctgtccggcgagaacggtctgaaaattgatattcatgtgatcatcccgtacgaaggcctgagcggtgaccaaatgggtcaaatcgagaaaatctttaaagtcgtctacccagttgacgatcaccacttcaaggttatcttgcattacggtacgctggtgattgatggtgtgaccccgaatatgattgactatttcggccgtccgtatgaaggcattgccgtttttgacggtaaaaagatcaccgtcaccggtaccctgtggaatggcaataagattattgacgagcgtctgattaacccggacggcagcctgctgttccgcgtgaccatcaacggtgtcacgggttggcgtctgtgcgagcgcatcctggcataatgaactgcacttgctttgataattaatgataaacaatctaaaagcactctaatcgttatcggagtgcttttagattactaatcaaattgcttctactaattgcctatcttccagtgatggaacagcatttgtgcattggctgcaacaatcagccttgatctggaagaagcaatgaaagctgctgttaagtctccgaatcaggtattgttcctgacaggtgtattcccatccggtaaacgcggatactttgcagttgatctgactcaggaataaattataaattaaggtaagaagattgtaggataagctaatgaaatagaaaaaggatgccgtcacacaacttgtcggcattcttttttgttttattagttgaaaatatagtgaaaaagttgcctaaatatgtatgttaacaaattatttgtcgtaactttgcactccaaatctgtttttaacatatggcactagtgaaaccagtaacgttatacgatgtcgcagagtatgccggtgtctctaaaagcaccgtttccctggtggtgaaccaggccagccacgtttctgcgaaaacgcgggaaaaagtggaagcggcgatggcggagctgaattacattcccaaccgcgtggcacaacaactggcgggcaaacagtcgttgctgattggcgttgccacctccagtctggccctgcacgcgctgtcgcaaattgtcgcggcgattaaatctcgcgcctatcaactgggtgccagcgtgttcgtgtcgatggtagaacgaagcggcatcgaagcctgtaaaacggcggtgcacaatcttctcgcgcaacgcgtcagtgggctgatcattaactatccgctggataaccaggatgccattgctgtggaagctgcctgcactaatgttccggcgttatttcttgatgtctctgaccagacacccatcaacagtattattttctcccatgaagacggtacgcgactgggcgtggagcatctggtcgcattgggtcaccagcaaatcgcgctgttagcgggcccattaagttctgtctcggcgcgtctgcgtctggctggctggcataaatatctcactcgcaatcaaattcagccgatagcggaacgggaaggcgactggagtgccatgtccggttttcaacaaaccatgcaaatgctgaatgagggcatcgttcccactgcgatgctggttgccaacgatcagatggcgctgggcgcaatgcgcgccattaccgagaccgggctgcgcgttggtgcggatatctcggtagtgggatacgacgataccgaagacagctcatgttatatcccgccgttaaccaccatcaaacaggattttcgcctgctggggcaaaccagcgtggaccgcttgctgcaactctctcagggccaggcggtgaagggcaatcagctgttgcccgtctcactggtgaaaagaaaaaccaccctggcgcccaatacgcaaaccgcctctccccgcgcgttggccgattcattaatgcagctggcacgacaggtttcccgactggaaagcgggcagtgagctttcctcggtaccaaattccagaaaagaggcctcccgaaaggggggccttttttcgttttggtcctacttgtgcctgttctatttccgaaccgaccgcttgtatgaatccatcaaaattcgttttctctatgttggattccttgttgctcatattgtgatgataatttctacaaatatagtcattggtaactatctatgaaactgtttgatacttttatagttgattaaacttgttcatggcatttgccttaatatcatccgctatgtcaatgtagggtttcatagctttgtagtcgctgtgtcccgtccatttcatgaccacctgtgccgggattccgagagccagcgcattgcagatgaatgtccttcttcctgcatgggtactgagcaaagcgtatttgggtgtgacttcatcaatacgttcatttcccttgtagtaggtttcccgtacaggctcgttgatttctgccagttcgcccagctctttcaggtaatcgttcatcttctggttgctgatgacgggcagagccatgtaattctcgaaatggatgtccttgtatttgtccagtatggctttgctgtatttgttcagttcaatcgtcaggctgtcggcagtcttgactgtggttatttcgatgtggtcggacttcacatcgcttcttttcagattgcgaacatccgaataccgcaaactcgtaaagcagcagaacaggaaaacatcacgcacacgttccaggtattgcttatccttgggtatctggtagtctttcagcttgttcagttcatcccaagtcaggaagattacttttttcgaggtggttttcagtttcggtttgaacgtatcgtatgcaatgttctgatgatgtcctttcttgaagctccagcgcaggaaccatttgaggaatcccatttgcttgccgatggtgctgtttctcatatccttggtgtcacgcaggaagttgacgtattcgttcaatccaaactcgttgaaatagttgaacgttgcatcctccttgaactctttgaggtggttcctcactgctgcaaatttttcataggtggatgccgtccagttattctggttaccgcactcttttacaaactcatcgaacacctcccaaaagctgacaggggcttcttccggctgttcttcgctggtgtctttcattctcatgttgaaagcttccttcaactgttgggtcgttggcatgacctcctgcacctcaaattccttgaaaatattctggatttcggcatagtatttcagcaagtccgtattgatttcggctgcactttgctttagcttgttggtacatccgctctttacccgctgcttatctgcatcccatttggctacgtcaatccggtagcccgttgtaaactcgatgcgttggctggcaaagatgacacgcatacggatgggtacgttctctacgattggcacaccgttctttttccggctctccaatgcaaaaatgatgttgcgcttgatattcataattgggtgcgtttgaaattctacacccaaatatacacccaattattgagatagcaaaagacatttagaaacatttacttttactctatattgtaatttacacttgattatcagtcgtttgcagtcttatgatattctgtgaaagtataagttcgagagcctgtctctccgcaaaaaacgctgaaaatcagcagattgcaaaacaaacaccctgttttacacccaagaatgtaaagtcggctgtttttgttttatttaagataatacaaccactacataataaaagagtagcgatattaaaagaatccgatgagaaaagactaatatttatctatccattcagtttgatttttcaggactttacatcgtcctgaaagtatttgttggtaccggtaccgaggacgcgtaaacatttacagttgcatgtggcctattgtttttagccgttaaatattttataactattaaatagcgatacaaattgttcgaaactaatattgtttatatcatatattctcgcatgttttaaagctttattaaattgattttttgtaaacagtttttcgtactctttgttaacccatttcattacaaaagtttcatatttttttctctctttaaatgccatttttgctggctttctttttaatacaattaatgtgctatccactttaggttttggatggaaataatacctaggaatttttgctaatatagaaatatctacctctgccattaacagcaatgctagtgatctgtttgtatctaataacattttagcaaaaccatattccactattaaataacttattgtggctgaactttcaaaaacaatttttcgaattatatttgtgcttatgttgtaaggtatgctgccaaatattttatatggattgtggctaggaaatgtaaatttcagtatatcatcatttactatttgatagttaggataatttaagagcttattacgagttacctcacataatttagaatcaatttctatcgccgttacaaaattacatctctttaccaatccagcagtaaaatgacctttccctgcacctatttcaaagatgttatctttttcatctaaacttatgcaattcattattttttctatgtgatattttgaagtaataaaattttgactatcttttatatttactttgttcattataacctctccttaatttattgcatctcttttcgaatatttatgttttttgagaaaagaacgtactcatggttcatcccgatatgcgtatcggtctgtatatcagcaactttctatgtgtttcaactacaatagtcatctattctcatctttctgagtccaccccctgcaaagcccctctttacgacataaaaattcggtcggaaaaggtatgcaaaagatgtttctctctttaagagaaactcttcgggatgcaaaaatatgaaaataactccaattcaccaaattatatagcgacttttttacaaaatgctaaaatttgttgatttccgtcaagcaattgttgagcaaaaatgtcttttacgataaaatgatacctcaatatcaactgtttagcaaaacgatatttctcttaaagagagaaacacctttttgttcaccaatccccgacttttaatcccgcggccatgattgaaaaaggaagagtatgagtattcaacatttccgtgtcgcccttattcccttttttgcggcattttgccttcctgtttttgctcacccagaaacgctggtgaaagtaaaagatgctgaagatcagttgggtgcacgagtgggttacatcgaactggatctcaacagcggtaagatccttgagagttttcgccccgaagaacgttttccaatgatgagcacttttaaagttctgctatgtggcgcggtattatcccgtattgacgccgggcaagagcaactcggtcgccgcatacactattctcagaatgacttggttgagtactcaccagtcacagaaaagcatcttacggatggcatgacagtaagagaattatgcagtgctgccataaccatgagtgataacactgcggccaacttacttctgacaacgatcggaggaccgaaggagctaaccgcttttttgcacaacatgggggatcatgtaactcgccttgatcgttgggaaccggagctgaatgaagccataccaaacgacgagcgtgacaccacgatgcctgtagcaatggcaacaacgttgcgcaaactattaactggcgaactacttactctagcttcccggcaacaattaatagactggatggaggcggataaagttgcaggaccacttctgcgctcggcccttccggctggctggtttattgctgataaatctggagccggtgagcgtgggtctcgcggtatcattgcagcactggggccagatggtaagccctcccgtatcgtagttatctacacgacggggagtcaggcaactatggatgaacgaaatagacagatcgctgagataggtgcctcactgattaagcattggtaactgtcagaccaagtttactcataacgcgtcaattcgagggggatcaattccgtgataggtgggctgcccttcctggttggcttggtttcatcagccatccgcttgccctcatctgttacgccggcggtagccggccagcctcgcagagcaggattcccgttgagcaccgccaggtgcgaataagggacagtgaagaaggaacacccgctcgcgggtgggcctacttcacctatcctgcccggctgacgccgttggatacaccaaggaaagtctacacgaaccctttggcaaaatcctgtatatcgtgcgaaaaaggatggatataccgaaaaaatcgctataatgaccccgaagcagggttatgcagcggaaaacggaattgatccggccacgatgcgtccggcgtagaggatctgaagatcagcagttcaacctgttgatagtacgtactaagctctcatgtttcacgtactaagctctcatgtttaacgtactaagctctcatgtttaacgaactaaaccctcatggctaacgtactaagctctcatggctaacgtactaagctctcatgtttcacgtactaagctctcatgtttgaacaataaaattaatataaatcagcaacttaaatagcctctaaggttttaagttttataagaaaaaaaagaatatataaggcttttaaagcttttaag

SEQ ID NO: 44 - DNA, 7051 bp, synthetic construct
  misc_feature 1..7051: note = Description of sequence: pBH114
  source 1..7051: mol_type = other DNA
gtttaacggttgtggacaacaagccagggatgtaacgcactgagaagcccttagagcctctcaaagcaattttgagtgacacaggaacacttaacggctgacatgggaattcccctccaccgcggtggtacaaagaaaattcgacaaactgttatttttctatctatttatttgaattttgagcgctcaaaatttacctttgtcggcaattttgagcgctcaaaattaaataaagatattctcgtcaaacaaatataaataatataaacatggtttttactctggaagattttgttggcgattggcgtcagaccgcgggttataatttggatcaagtcctggaacagggtggcgtaagctctctgttccagaacctgggtgtgagcgtgacgccgattcagcgcatcgttctgtccggcgagaacggtctgaaaattgatattcatgtgatcatcccgtacgaaggcctgagcggtgaccaaatgggtcaaatcgagaaaatctttaaagtcgtctacccagttgacgatcaccacttcaaggttatcttgcattacggtacgctggtgattgatggtgtgaccccgaatatgattgactatttcggccgtccgtatgaaggcattgccgtttttgacggtaaaaagatcaccgtcaccggtaccctgtggaatggcaataagattattgacgagcgtctgattaacccggacggcagcctgctgttccgcgtgaccatcaacggtgtcacgggttggcgtctgtgcgagcgcatcctggcataatgaactgcacttgctttgataattaatgataaacaatctaaaagcactctaatcgttatcggagtgcttttagattactaatcaaattgcttctactaattgcctatcttccagtgatggaacagcatttgtgcattggctgcaacaatcagccttgatctggaagaagcaatgaaagctgctgttaagtctccgaatcaggtattgttcctgacaggtgtattcccatccggtaaacgcggatactttgcagttgatctgactcaggaataaattataaattaaggtaagaagattgtaggataagctaatgaaatagaaaaaggatgccgtcacacaacttgtcggcattcttttttgttttattagttgaaaatatagtgaaaaagttgcctaaatatgtatgttaacaaattatttgtcgtaactttgcactccaaatctgtttttaacatatggcactagtgaaaccagtaacgttatacgatgtcgcagagtatgccggtgtctctcatcagaccgtttccaatgtggtgaaccaggccagccacgtttctgcgaaaacgcgggaaaaagtggaagcggcgatggcggagctgaattacattcccaaccgcgtggcacaacaactggcgggcaaacagtcgttgctgattggcgttgccacctccagtctggccctgcacgcgctgtcgcaaattgtcgcggcgattaaatctcgcgcctatcaactgggtgccagcgtgttcgtgtcgatggtagaacgaagcggcatcgaagcctgtaaaacggcggtgcacaatcttctcgcgcaacgcgtcagtgggctgatcattaactatccgctggataaccaggatgccattgctgtggaagctgcctgcactaatgttccggcgttatttcttgatgtctctgaccagacacccatcaacagtattattttctcccatgaagacggtacgcgactgggcgtggagcatctggtcgcattgggtcaccagcaaatcgcgctgttagcgggcccattaagttctgtctcggcgcgtctgcgtctggctggctggcataaatatctcactcgcaatcaaattcagccgatagcggaacgggaaggcgactggagtgccatgtccggttttcaacaaaccatgcaaatgctgaatgagggcatcgttcccactgcgatgctggttgccaacgatcagatggcgctgggcgcaatgcgcgccattaccgagaccgggctgcgcgttggtgcggatatctcggtagtgggatacgacgataccgaagacagctcatgttatatcccgccgttaaccaccatcaaacaggattttcgcctgctggggcaaaccagcgtggaccgcttgctgcaactctctcagggccaggcggtgaagggcaatcagctgttgcccgtctcactggtgaaaagaaaaaccaccctggcgcccaatacgcaaaccgcctctccccgcgcgttggccgattcattaatgcagctggcacgacaggtttcccgactggaaagcgggcagtgagctttcctcggtaccaaattccagaaaagaggcctcccgaaaggggggccttttttcgttttggtcctacttgtgcctgttctatttccgaaccgaccgcttgtatgaatccatcaaaattcgttttctctatgttggattccttgttgctcatattgtgatgataatttctacaaatatagtcattggtaactatctatgaaactgtttgatacttttatagttgattaaacttgttcatggcatttgccttaatatcatccgctatgtcaatgtagggtttcatagctttgtagtcgctgtgtcccgtccatttcatgaccacctgtgccgggattccgagagccagcgcattgcagatgaatgtccttcttcctgcatgggtactgagcaaagcgtatttgggtgtgacttcatcaatacgttcatttcccttgtagtaggtttcccgtacaggctcgttgatttctgccagttcgcccagctctttcaggtaatcgttcatcttctggttgctgatgacgggcagagccatgtaattctcgaaatggatgtccttgtatttgtccagtatggctttgctgtatttgttcagttcaatcgtcaggctgtcggcagtcttgactgtggttatttcgatgtggtcggacttcacatcgcttcttttcagattgcgaacatccgaataccgcaaactcgtaaagcagcagaacaggaaaacatcacgcacacgttccaggtattgcttatccttgggtatctggtagtctttcagcttgttcagttcatcccaagtcaggaagattacttttttcgaggtggttttcagtttcggtttgaacgtatcgtatgcaatgttctgatgatgtcctttcttgaagctccagcgcaggaaccatttgaggaatcccatttgcttgccgatggtgctgtttctcatatccttggtgtcacgcaggaagttgacgtattcgttcaatccaaactcgttgaaatagttgaacgttgcatcctccttgaactctttgaggtggttcctcactgctgcaaatttttcataggtggatgccgtccagttattctggttaccgcactcttttacaaactcatcgaacacctcccaaaagctgacaggggcttcttccggctgttcttcgctggtgtctttcattctcatgttgaaagcttccttcaactgttgggtcgttggcatgacctcctgcacctcaaattccttgaaaatattctggatttcggcatagtatttcagcaagtccgtattgatttcggctgcactttgctttagcttgttggtacatccgctctttacccgctgcttatctgcatcccatttggctacgtcaatccggtagcccgttgtaaactcgatgcgttggctggcaaagatgacacgcatacggatgggtacgttctctacgattggcacaccgttctttttccggctctccaatgcaaaaatgatgttgcgcttgatattcataattgggtgcgtttgaaattctacacccaaatatacacccaattattgagatagcaaaagacatttagaaacatttacttttactctatattgtaatttacacttgattatcagtcgtttgcagtcttatgatattctgtgaaagtataagttcgagagcctgtctctccgcaaaaaacgctgaaaatcagcagattgcaaaacaaacaccctgttttacacccaagaatgtaaagtcggctgtttttgttttatttaagataatacaaccactacataataaaagagtagcgatattaaaagaatccgatgagaaaagactaatatttatctatccattcagtttgatttttcaggactttacatcgtcctgaaagtatttgttggtaccggtaccgaggacgcgtaaacatttacagttgcatgtggcctattgtttttagccgttaaatattttataactattaaatagcgatacaaattgttcgaaactaatattgtttatatcatatattctcgcatgttttaaagctttattaaattgattttttgtaaacagtttttcgtactctttgttaacccatttcattacaaaagtttcatatttttttctctctttaaatgccatttttgctggctttctttttaatacaattaatgtgctatccactttaggttttggatggaaataatacctaggaatttttgctaatatagaaatatctacctctgccattaacagcaatgctagtgatctgtttgtatctaataacattttagcaaaaccatattccactattaaataacttattgtggctgaactttcaaaaacaatttttcgaattatatttgtgcttatgttgtaaggtatgctgccaaatattttatatggattgtggctaggaaatgtaaatttcagtatatcatcatttactatttgatagttaggataatttaagagcttattacgagttacctcacataatttagaatcaatttctatcgccgttacaaaattacatctctttaccaatccagcagtaaaatgacctttccctgcacctatttcaaagatgttatctttttcatctaaacttatgcaattcattattttttctatgtgatattttgaagtaataaaattttgactatcttttatatttactttgttcattataacctctccttaatttattgcatctcttttcgaatatttatgttttttgagaaaagaacgtactcatggttcatcccgatatgcgtatcggtctgtatatcagcaactttctatgtgtttcaactacaatagtcatctattctcatctttctgagtccaccccctgcaaagcccctctttacgacataaaaattcggtcggaaaaggtatgcaaaagatgtttctctctttaagagaaactcttcgggatgcaaaaatatgaaaataactccaattcaccaaattatatagcgacttttttacaaaatgctaaaatttgttgatttccgtcaagcaattgttgagcaaaaatgtcttttacgataaaatgatacctcaatatcaactgtttagcaaaacgatatttctcttaaagagagaaacacctttttgttcaccaatccccgacttttaatcccgcggccatgattgaaaaaggaagagtatgagtattcaacatttccgtgtcgcccttattcccttttttgcggcattttgccttcctgtttttgctcacccagaaacgctggtgaaagtaaaagatgctgaagatcagttgggtgcacgagtgggttacatcgaactggatctcaacagcggtaagatccttgagagttttcgccccgaagaacgttttccaatgatgagcacttttaaagttctgctatgtggcgcggtattatcccgtattgacgccgggcaagagcaactcggtcgccgcatacactattctcagaatgacttggttgagtactcaccagtcacagaaaagcatcttacggatggcatgacagtaagagaattatgcagtgctgccataaccatgagtgataacactgcggccaacttacttctgacaacgatcggaggaccgaaggagctaaccgcttttttgcacaacatgggggatcatgtaactcgccttgatcgttgggaaccggagctgaatgaagccataccaaacgacgagcgtgacaccacgatgcctgtagcaatggcaacaacgttgcgcaaactattaactggcgaactacttactctagcttcccggcaacaattaatagactggatggaggcggataaagttgcaggaccacttctgcgctcggcccttccggctggctggtttattgctgataaatctggagccggtgagcgtgggtctcgcggtatcattgcagcactggggccagatggtaagccctcccgtatcgtagttatctacacgacggggagtcaggcaactatggatgaacgaaatagacagatcgctgagataggtgcctcactgattaagcattggtaactgtcagaccaagtttactcataacgcgtcaattcgagggggatcaattccgtgataggtgggctgcccttcctggttggcttggtttcatcagccatccgcttgccctcatctgttacgccggcggtagccggccagcctcgcagagcaggattcccgttgagcaccgccaggtgcgaataagggacagtgaagaaggaacacccgctcgcgggtgggcctacttcacctatcctgcccggctgacgccgttggatacaccaaggaaagtctacacgaaccctttggcaaaatcctgtatatcgtgcgaaaaaggatggatataccgaaaaaatcgctataatgaccccgaagcagggttatgcagcggaaaacggaattgatccggccacgatgcgtccggcgtagaggatctgaagatcagcagttcaacctgttgatagtacgtactaagctctcatgtttcacgtactaagctctcatgtttaacgtactaagctctcatgtttaacgaactaaaccctcatggctaacgtactaagctctcatggctaacgtactaagctctcatgtttcacgtactaagctctcatgtttgaacaataaaattaatataaatcagcaacttaaatagcctctaaggttttaagttttataagaaaaaaaagaatatataaggcttttaaagcttttaag

SEQ ID NO: 45 - DNA, 7051 bp, synthetic construct
  misc_feature 1..7051: note = Description of sequence: pBH115
  source 1..7051: mol_type = other DNA
gtttaacggttgtggacaacaagccagggatgtaacgcactgagaagcccttagagcctctcaaagcaattttgagtgacacaggaacacttaacggctgacatgggaattcccctccaccgcggtggtacaaagaaaattcgacaaactgttatttttctatctatttatttgaattgacagcgctgtcaatttacctttgtcggcaattgacagcgctgtcaattaaataaagatattctcgtcaaacaaatataaataatataaacatggtttttactctggaagattttgttggcgattggcgtcagaccgcgggttataatttggatcaagtcctggaacagggtggcgtaagctctctgttccagaacctgggtgtgagcgtgacgccgattcagcgcatcgttctgtccggcgagaacggtctgaaaattgatattcatgtgatcatcccgtacgaaggcctgagcggtgaccaaatgggtcaaatcgagaaaatctttaaagtcgtctacccagttgacgatcaccacttcaaggttatcttgcattacggtacgctggtgattgatggtgtgaccccgaatatgattgactatttcggccgtccgtatgaaggcattgccgtttttgacggtaaaaagatcaccgtcaccggtaccctgtggaatggcaataagattattgacgagcgtctgattaacccggacggcagcctgctgttccgcgtgaccatcaacggtgtcacgggttggcgtctgtgcgagcgcatcctggcataatgaactgcacttgctttgataattaatgataaacaatctaaaagcactctaatcgttatcggagtgcttttagattactaatcaaattgcttctactaattgcctatcttccagtgatggaacagcatttgtgcattggctgcaacaatcagccttgatctggaagaagcaatgaaagctgctgttaagtctccgaatcaggtattgttcctgacaggtgtattcccatccggtaaacgcggatactttgcagttgatctgactcaggaataaattataaattaaggtaagaagattgtaggataagctaatgaaatagaaaaaggatgccgtcacacaacttgtcggcattcttttttgttttattagttgaaaatatagtgaaaaagttgcctaaatatgtatgttaacaaattatttgtcgtaactttgcactccaaatctgtttttaacatatggcactagtgaaaccagtaacgttatacgatgtcgcagagtatgccggtgtctctggaaagaccgtttcccgcgtggtgaaccaggccagccacgtttctgcgaaaacgcgggaaaaagtggaagcggcgatggcggagctgaattacattcccaaccgcgtggcacaacaactggcgggcaaacagtcgttgctgattggcgttgccacctccagtctggccctgcacgcgctgtcgcaaattgtcgcggcgattaaatctcgcgcctatcaactgggtgccagcgtgttcgtgtcgatggtagaacgaagcggcatcgaagcctgtaaaacggcggtgcacaatcttctcgcgcaacgcgtcagtgggctgatcattaactatccgctggataaccaggatgccattgctgtggaagctgcctgcactaatgttccggcgttatttcttgatgtctctgaccagacacccatcaacagtattattttctcccatgaagacggtacgcgactgggcgtggagcatctggtcgcattgggtcaccagcaaatcgcgctgttagcgggcccattaagttctgtctcggcgcgtctgcgtctggctggctggcataaatatctcactcgcaatcaaattcagccgatagcggaacgggaaggcgactggagtgccatgtccggttttcaacaaaccatgcaaatgctgaatgagggcatcgttcccactgcgatgctggttgccaacgatcagatggcgctgggcgcaatgcgcgccattaccgagaccgggctgcgcgttggtgcggatatctcggtagtgggatacgacgataccgaagacagctcatgttatatcccgccgttaaccaccatcaaacaggattttcgcctgctggggcaaaccagcgtggaccgcttgctgcaactctctcagggccaggcggtgaagggcaatcagctgttgcccgtctcactggtgaaaagaaaaaccaccctggcgcccaatacgcaaaccgcctctccccgcgcgttggccgattcattaatgcagctggcacgacaggtttcccgactggaaagcgggcagtgagctttcctcggtaccaaattccagaaaagaggcctcccgaaaggggggccttttttcgttttggtcctacttgtgcctgttctatttccgaaccgaccgcttgtatgaatccatcaaaattcgttttctctatgttggattccttgttgctcatattgtgatgataatttctacaaatatagtcattggtaactatctatgaaactgtttgatacttttatagttgattaaacttgttcatggcatttgccttaatatcatccgctatgtcaatgtagggtttcatagctttgtagtcgctgtgtcccgtccatttcatgaccacctgtgccgggattccgagagccagcgcattgcagatgaatgtccttcttcctgcatgggtactgagcaaagcgtatttgggtgtgacttcatcaatacgttcatttcccttgtagtaggtttcccgtacaggctcgttgatttctgccagttcgcccagctctttcaggtaatcgttcatcttctggttgctgatgacgggcagagccatgtaattctcgaaatggatgtccttgtatttgtccagtatggctttgctgtatttgttcagttcaatcgtcaggctgtcggcagtcttgactgtggttatttcgatgtggtcggacttcacatcgcttcttttcagattgcgaacatccgaataccgcaaactcgtaaagcagcagaacaggaaaacatcacgcacacgttccaggtattgcttatccttgggtatctggtagtctttcagcttgttcagttcatcccaagtcaggaagattacttttttcgaggtggttttcagtttcggtttgaacgtatcgtatgcaatgttctgatgatgtcctttcttgaagctccagcgcaggaaccatttgaggaatcccatttgcttgccgatggtgctgtttctcatatccttggtgtcacgcaggaagttgacgtattcgttcaatccaaactcgttgaaatagttgaacgttgcatcctccttgaactctttgaggtggttcctcactgctgcaaatttttcataggtggatgccgtccagttattctggttaccgcactcttttacaaactcatcgaacacctcccaaaagctgacaggggcttcttccggctgttcttcgctggtgtctttcattctcatgttgaaagcttccttcaactgttgggtcgttggcatgacctcctgcacctcaaattccttgaaaatattctggatttcggcatagtatttcagcaagtccgtattgatttcggctgcactttgctttagcttgttggtacatccgctctttacccgctgcttatctgcatcccatttggctacgtcaatccggtagcccgttgtaaactcgatgcgttggctggcaaagatgacacgcatacggatgggtacgttctctacgattggcacaccgttctttttccggctctccaatgcaaaaatgatgttgcgcttgatattcataattgggtgcgtttgaaattctacacccaaatatacacccaattattgagatagcaaaagacatttagaaacatttacttttactctatattgtaatttacacttgattatcagtcgtttgcagtcttatgatattctgtgaaagtataagttcgagagcctgtctctccgcaaaaaacgctgaaaatcagcagattgcaaaacaaacaccctgttttacacccaagaatgtaaagtcggctgtttttgttttatttaagataatacaaccactacataataaaagagtagcgatattaaaagaatccgatgagaaaagactaatatttatctatccattcagtttgatttttcaggactttacatcgtcctgaaagtatttgttggtaccggtaccgaggacgcgtaaacatttacagttgcatgtggcctattgtttttagccgttaaatattttataactattaaatagcgatacaaattgttcgaaactaatattgtttatatcatatattctcgcatgttttaaagctttattaaattgattttttgtaaacagtttttcgtactctttgttaacccatttcattacaaaagtttcatatttttttctctctttaaatgccatttttgctggctttctttttaatacaattaatgtgctatccactttaggttttggatggaaataatacctaggaatttttgctaatatagaaatatctacctctgccattaacagcaatgctagtgatctgtttgtatctaataacattttagcaaaaccatattccactattaaataacttattgtggctgaactttcaaaaacaatttttcgaattatatttgtgcttatgttgtaaggtatgctgccaaatattttatatggattgtggctaggaaatgtaaatttcagtatatcatcatttactatttgatagttaggataatttaagagcttattacgagttacctcacataatttagaatcaatttctatcgccgttacaaaattacatctctttaccaatccagcagtaaaatgacctttccctgcacctatttcaaagatgttatctttttcatctaaacttatgcaattcattattttttctatgtgatattttgaagtaataaaattttgactatcttttatatttactttgttcattataacctctccttaatttattgcatctcttttcgaatatttatgttttttgagaaaagaacgtactcatggttcatcccgatatgcgtatcggtctgtatatcagcaactttctatgtgtttcaactacaatagtcatctattctcatctttctgagtccaccccctgcaaagcccctctttacgacataaaaattcggtcggaaaaggtatgcaaaagatgtttctctctttaagagaaactcttcgggatgcaaaaatatgaaaataactccaattcaccaaattatatagcgacttttttacaaaatgctaaaatttgttgatttccgtcaagcaattgttgagcaaaaatgtcttttacgataaaatgatacctcaatatcaactgtttagcaaaacgatatttctcttaaagagagaaacacctttttgttcaccaatccccgacttttaatcccgcggccatgattgaaaaaggaagagtatgagtattcaacatttccgtgtcgcccttattcccttttttgcggcattttgccttcctgtttttgctcacccagaaacgctggtgaaagtaaaagatgctgaagatcagttgggtgcacgagtgggttacatcgaactggatctcaacagcggtaagatccttgagagttttcgccccgaagaacgttttccaatgatgagcacttttaaagttctgctatgtggcgcggtattatcccgtattgacgccgggcaagagcaactcggtcgccgcatacactattctcagaatgacttggttgagtactcaccagtcacagaaaagcatcttacggatggcatgacagtaagagaattatgcagtgctgccataaccatgagtgataacactgcggccaacttacttctgacaacgatcggaggaccgaaggagctaaccgcttttttgcacaacatgggggatcatgtaactcgccttgatcgttgggaaccggagctgaatgaagccataccaaacgacgagcgtgacaccacgatgcctgtagcaatggcaacaacgttgcgcaaactattaactggcgaactacttactctagcttcccggcaacaattaatagactggatggaggcggataaagttgcaggaccacttctgcgctcggcccttccggctggctggtttattgctgataaatctggagccggtgagcgtgggtctcgcggtatcattgcagcactggggccagatggtaagccctcccgtatcgtagttatctacacgacggggagtcaggcaactatggatgaacgaaatagacagatcgctgagataggtgcctcactgattaagcattggtaactgtcagaccaagtttactcataacgcgtcaattcgagggggatcaattccgtgataggtgggctgcccttcctggttggcttggtttcatcagccatccgcttgccctcatctgttacgccggcggtagccggccagcctcgcagagcaggattcccgttgagcaccgccaggtgcgaataagggacagtgaagaaggaacacccgctcgcgggtgggcctacttcacctatcctgcccggctgacgccgttggatacaccaaggaaagtctacacgaaccctttggcaaaatcctgtatatcgtgcgaaaaaggatggatataccgaaaaaatcgctataatgaccccgaagcagggttatgcagcggaaaacggaattgatccggccacgatgcgtccggcgtagaggatctgaagatcagcagttcaacctgttgatagtacgtactaagctctcatgtttcacgtactaagctctcatgtttaacgtactaagctctcatgtttaacgaactaaaccctcatggctaacgtactaagctctcatggctaacgtactaagctctcatgtttcacgtactaagctctcatgtttgaacaataaaattaatataaatcagcaacttaaatagcctctaaggttttaagttttataagaaaaaaaagaatatataaggcttttaaagcttttaag

SEQ ID NO: 46 - DNA, 7085 bp, synthetic construct
  misc_feature 1..7085: note = Description of sequence: pBH116
  source 1..7085: mol_type = other DNA
gtttaacggttgtggacaacaagccagggatgtaacgcactgagaagcccttagagcctctcaaagcaattttgagtgacacaggaacacttaacggctgacatgggaattcccctccaccgcggtggtacaaagaaaattcgacaaactgttatttttctatctatttatttgaattgtgagcggataacaattacctttgtcggcaattgtgagcggataacaattaaataaagatattctcgtcaaacaaatataaataatataaacatggtttttactctggaagattttgttggcgattggcgtcagaccgcgggttataatttggatcaagtcctggaacagggtggcgtaagctctctgttccagaacctgggtgtgagcgtgacgccgattcagcgcatcgttctgtccggcgagaacggtctgaaaattgatattcatgtgatcatcccgtacgaaggcctgagcggtgaccaaatgggtcaaatcgagaaaatctttaaagtcgtctacccagttgacgatcaccacttcaaggttatcttgcattacggtacgctggtgattgatggtgtgaccccgaatatgattgactatttcggccgtccgtatgaaggcattgccgtttttgacggtaaaaagatcaccgtcaccggtaccctgtggaatggcaataagattattgacgagcgtctgattaacccggacggcagcctgctgttccgcgtgaccatcaacggtgtcacgggttggcgtctgtgcgagcgcatcctggcataatgaactgcacttgctttgataattaatgataaacaatctaaaagcactctaatcgttatcggagtgcttttagattactaatcaaattgcttctactaattgcctatcttccagtgatggaacagcatttgtgcattggctgcaacaatcagccttgatctggaagaagcaatgaaagctgctgttaagtctccgaatcaggtattgttcctgacaggtgtattcccatccggtaaacgcggatactttgcagttgatctgactcaggaataaattataaattaaggtaagaagattgtaggataagctaatgaaatagaaaaaggatgccgtcacacaacttgtcggcattcttttttgttttattagttgaaaatatagtgaaaaagttgcctaaatatgtatgttaacaaattatttgtcgtaactttgcactccaaatctgtttttaacatatggcactagtgaaaccagtaacgttatacgatgtcgcagagtatgccggtgtctcttatcagaccgtttcccgcgtggtgaaccaggccagccacgtttctgcgaaaacgcgggaaaaagtggaagcggcgatggcggagctcaattacattcccaaccgcgtggcacaacaactggcgggcaaagcgtcgcataccattggcatgttgatcactgccagtaccaatcctttctattcagaactggtgcgtggcgttgaacgcagctgcttcgaacgcggttatagtctcgatctttgcaataccgaaggcgatgaacagcggatgaatcgcaatctggaaacgctgatgcaaaaacgcgttgatggcttgctgttactgtgcaccgaaacgcatcaaccttcgcgtgaaatcatgcaacgttatccgacagtgcctactgtgatgatggactgggctccgttcgatggcgacagcgatcttattcaggataactcgttgctgggcggagacttagcaacgcaatatctgatcgataaaggtcatacccgtatcgcctgtattaccggcccgctggataaaactccggcgcgcctgcggttggaaggttatcgggcggcgatgaaacgtgcgggtctcaacattcctgatggctatgaagtcactggtgattttgaatttaacggcgggtttgacgctatgcgccaactgctatcacatccgctgcgtcctcaggccgtctttaccggaaatgacgctatggctgttggcgtttaccaggcgttatatcaggcagagttacaggttccgcaggatatcgcggtgattggctatgacgatatcgaactggcaagctttatgacgccaccattaaccactatccaccaaccgaaagatgaactgggggagctggcgattgatgtactcatccatcggataacccagccgacccttcagcaacaacgattacaacttactccgattctgatggaacgcggttcggcttagctggtgaaaagaaaaaccaccctggcgcccaatacgcaaaccgcctctccccgcgcgttggccgattcattaatgcagctggcacgacaggtttcccgactggaaagcgggcagtgagctttcctcggtaccaaattccagaaaagaggcctcccgaaaggggggccttttttcgttttggtcctacttgtgcctgttctatttccgaaccgaccgcttgtatgaatccatcaaaattcgttttctctatgttggattccttgttgctcatattgtgatgataatttctacaaatatagtcattggtaactatctatgaaactgtttgatacttttatagttgattaaacttgttcatggcatttgccttaatatcatccgctatgtcaatgtagggtttcatagctttgtagtcgctgtgtcccgtccatttcatgaccacctgtgccgggattccgagagccagcgcattgcagatgaatgtccttcttcctgcatgggtactgagcaaagcgtatttgggtgtgacttcatcaatacgttcatttcccttgtagtaggtttcccgtacaggctcgttgatttctgccagttcgcccagctctttcaggtaatcgttcatcttctggttgctgatgacgggcagagccatgtaattctcgaaatggatgtccttgtatttgtccagtatggctttgctgtatttgttcagttcaatcgtcaggctgtcggcagtcttgactgtggttatttcgatgtggtcggacttcacatcgcttcttttcagattgcgaacatccgaataccgcaaactcgtaaagcagcagaacaggaaaacatcacgcacacgttccaggtattgcttatccttgggtatctggtagtctttcagcttgttcagttcatcccaagtcaggaagattacttttttcgaggtggttttcagtttcggtttgaacgtatcgtatgcaatgttctgatgatgtcctttcttgaagctccagcgcaggaaccatttgaggaatcccatttgcttgccgatggtgctgtttctcatatccttggtgtcacgcaggaagttgacgtattcgttcaatccaaactcgttgaaatagttgaacgttgcatcctccttgaactctttgaggtggttcctcactgctgcaaatttttcataggtggatgccgtccagttattctggttaccgcactcttttacaaactcatcgaacacctcccaaaagctgacaggggcttcttccggctgttcttcgctggtgtctttcattctcatgttgaaagcttccttcaactgttgggtcgttggcatgacctcctgcacctcaaattccttgaaaatattctggatttcggcatagtatttcagcaagtccgtattgatttcggctgcactttgctttagcttgttggtacatccgctctttacccgctgcttatctgcatcccatttggctacgtcaatccggtagcccgttgtaaactcgatgcgttggctggcaaagatgacacgcatacggatgggtacgttctctacgattggcacaccgttctttttccggctctccaatgcaaaaatgatgttgcgcttgatattcataattgggtgcgtttgaaattctacacccaaatatacacccaattattgagatagcaaaagacatttagaaacatttacttttactctatattgtaatttacacttgattatcagtcgtttgcagtcttatgatattctgtgaaagtataagttcgagagcctgtctctccgcaaaaaacgctgaaaatcagcagattgcaaaacaaacaccctgttttacacccaagaatgtaaagtcggctgtttttgttttatttaagataatacaaccactacataataaaagagtagcgatattaaaagaatccgatgagaaaagactaatatttatctatccattcagtttgatttttcaggactttacatcgtcctgaaagtatttgttggtaccggtaccgaggacgcgtaaacatttacagttgcatgtggcctattgtttttagccgttaaatattttataactattaaatagcgatacaaattgttcgaaactaatattgtttatatcatatattctcgcatgttttaaagctttattaaattgattttttgtaaacagtttttcgtactctttgttaacccatttcattacaaaagtttcatatttttttctctctttaaatgccatttttgctggctttctttttaatacaattaatgtgctatccactttaggttttggatggaaataatacctaggaatttttgctaatatagaaatatctacctctgccattaacagcaatgctagtgatctgtttgtatctaataacattttagcaaaaccatattccactattaaataacttattgtggctgaactttcaaaaacaatttttcgaattatatttgtgcttatgttgtaaggtatgctgccaaatattttatatggattgtggctaggaaatgtaaatttcagtatatcatcatttactatttgatagttaggataatttaagagcttattacgagttacctcacataatttagaatcaatttctatcgccgttacaaaattacatctctttaccaatccagcagtaaaatgacctttccctgcacctatttcaaagatgttatctttttcatctaaacttatgcaattcattattttttctatgtgatattttgaagtaataaaattttgactatcttttatatttactttgttcattataacctctccttaatttattgcatctcttttcgaatatttatgttttttgagaaaagaacgtactcatggttcatcccgatatgcgtatcggtctgtatatcagcaactttctatgtgtttcaactacaatagtcatctattctcatctttctgagtccaccccctgcaaagcccctctttacgacataaaaattcggtcggaaaaggtatgcaaaagatgtttctctctttaagagaaactcttcgggatgcaaaaatatgaaaataactccaattcaccaaattatatagcgacttttttacaaaatgctaaaatttgttgatttccgtcaagcaattgttgagcaaaaatgtcttttacgataaaatgatacctcaatatcaactgtttagcaaaacgatatttctcttaaagagagaaacacctttttgttcaccaatccccgacttttaatcccgcggccatgattgaaaaaggaagagtatgagtattcaacatttccgtgtcgcccttattcccttttttgcggcattttgccttcctgtttttgctcacccagaaacgctggtgaaagtaaaagatgctgaagatcagttgggtgcacgagtgggttacatcgaactggatctcaacagcggtaagatccttgagagttttcgccccgaagaacgttttccaatgatgagcacttttaaagttctgctatgtggcgcggtattatcccgtattgacgccgggcaagagcaactcggtcgccgcatacactattctcagaatgacttggttgagtactcaccagtcacagaaaagcatcttacggatggcatgacagtaagagaattatgcagtgctgccataaccatgagtgataacactgcggccaacttacttctgacaacgatcggaggaccgaaggagctaaccgcttttttgcacaacatgggggatcatgtaactcgccttgatcgttgggaaccggagctgaatgaagccataccaaacgacgagcgtgacaccacgatgcctgtagcaatggcaacaacgttgcgcaaactattaactggcgaactacttactctagcttcccggcaacaattaatagactggatggaggcggataaagttgcaggaccacttctgcgctcggcccttccggctggctggtttattgctgataaatctggagccggtgagcgtgggtctcgcggtatcattgcagcactggggccagatggtaagccctcccgtatcgtagttatctacacgacggggagtcaggcaactatggatgaacgaaatagacagatcgctgagataggtgcctcactgattaagcattggtaactgtcagaccaagtttactcataacgcgtcaattcgagggggatcaattccgtgataggtgggctgcccttcctggttggcttggtttcatcagccatccgcttgccctcatctgttacgccggcggtagccggccagcctcgcagagcaggattcccgttgagcaccgccaggtgcgaataagggacagtgaagaaggaacacccgctcgcgggtgggcctacttcacctatcctgcccggctgacgccgttggatacaccaaggaaagtctacacgaaccctttggcaaaatcctgtatatcgtgcgaaaaaggatggatataccgaaaaaatcgctataatgaccccgaagcagggttatgcagcggaaaacggaattgatccggccacgatgcgtccggcgtagaggatctgaagatcagcagttcaacctgttgatagtacgtactaagctctcatgtttcacgtactaagctctcatgtttaacgtactaagctctcatgtttaacgaactaaaccctcatggctaacgtactaagctctcatggctaacgtactaagctctcatgtttcacgtactaagctctcatgtttgaacaataaaattaatataaatcagcaacttaaatagcctctaaggttttaagttttataagaaaaaaaagaatatataaggcttttaaagcttttaag

SEQ ID NO: 47 - DNA, 7084 bp, synthetic construct
  misc_feature 1..7084: note = Description of sequence: pBH117
  source 1..7084: mol_type = other DNA
gtttaacggttgtggacaacaagccagggatgtaacgcactgagaagcccttagagcctctcaaagcaattttgagtgacacaggaacacttaacggctgacatgggaattcccctccaccgcggtggtacaaagaaaattcgacaaactgttatttttctatctatttatttgaattttaagcgcttaaaatttacctttgtcggcaattttaagcgcttaaaattaaataaagatattctcgtcaaacaaatataaataatataaacatggtttttactctggaagattttgttggcgattggcgtcagaccgcgggttataatttggatcaagtcctggaacagggtggcgtaagctctctgttccagaacctgggtgtgagcgtgacgccgattcagcgcatcgttctgtccggcgagaacggtctgaaaattgatattcatgtgatcatcccgtacgaaggcctgagcggtgaccaaatgggtcaaatcgagaaaatctttaaagtcgtctacccagttgacgatcaccacttcaaggttatcttgcattacggtacgctggtgattgatggtgtgaccccgaatatgattgactatttcggccgtccgtatgaaggcattgccgtttttgacggtaaaaagatcaccgtcaccggtaccctgtggaatggcaataagattattgacgagcgtctgattaacccggacggcagcctgctgttccgcgtgaccatcaacggtgtcacgggttggcgtctgtgcgagcgcatcctggcataatgaactgcacttgctttgataattaatgataaacaatctaaaagcactctaatcgttatcggagtgcttttagattactaatcaaattgcttctactaattgcctatcttccagtgatggaacagcatttgtgcattggctgcaacaatcagccttgatctggaagaagcaatgaaagctgctgttaagtctccgaatcaggtattgttcctgacaggtgtattcccatccggtaaacgcggatactttgcagttgatctgactcaggaataaattataaattaaggtaagaagattgtaggataagctaatgaaatagaaaaaggatgccgtcacacaacttgtcggcattcttttttgttttattagttgaaaatatagtgaaaaagttgcctaaatatgtatgttaacaaattatttgtcgtaactttgcactccaaatctgtttttaacatatggcactagtgaaaccagtaacgttatacgatgtcgcagagtatgccggtgtctctaccgcgaccgtttccaacgtggtgaaccaggccagccacgtttctgcgaaaacgcgggaaaaagtggaagcggcgatggcggagctcaattacattcccaaccgcgtggcacaacaactggcgggcaaagcgtcgcataccattggcatgttgatcactgccagtaccaatcctttctattcagaactggtgcgtggcgttgaacgcagctgcttcgaacgcggttatagtctcgatctttgcaataccgaaggcgatgaacagcggatgaatcgcaatctggaaacgctgatgcaaaaacgcgttgatggcttgctgttactgtgcaccgaaacgcatcaaccttcgcgtgaaatcatgcaacgttatccgacagtgcctactgtgatgatggactgggctccgttcgatggcgacagcgatcttattcaggataactcgttgctgggcggagacttagcaacgcaatatctgatcgataaaggtcatacccgtatcgcctgtattaccggcccgctggataaaactccggcgcgcctgcggttggaaggttatcgggcggcgatgaaacgtgcgggtctcaacattcctgatggctatgaagtcactggtgattttgaatttaacggcgggtttgacgctatgcgccaactgctatcacatccgctgcgtcctcaggccgtctttaccggaaatgacgctatggctgttggcgtttaccaggcgttatatcaggcagagttacaggttccgcaggatatcgcggtgattggctatgacgatatcgaactggcaagctttatgacgccaccattaaccactatccaccaaccgaaagatgaactgggggagctggcgattgatgtactcatccatcggataacccagccgacccttcagcaacaacgattacaacttactccgattctgatggaacgcggttcggcttagctggtgaaaagaaaaaccaccctggcgcccaatacgcaaaccgcctctccccgcgcgttggccgattcattaatgcagctggcacgacaggtttcccgactggaaagcgggcagtgagctttcctcggtaccaaattccagaaaagaggcctcccgaaaggggggccttttttcgttttggtcctacttgtgcctgttctatttccgaaccgaccgcttgtatgaatccatcaaaattcgttttctctatgttggattccttgttgctcatattgtgatgataatttctacaaatatagtcattggtaactatctatgaaactgtttgatacttttatagttgattaaacttgttcatggcatttgccttaatatcatccgctatgtcaatgtagggtttcatagctttgtagtcgctgtgtcccgtccatttcatgaccacctgtgccgggattccgagagccagcgcattgcagatgaatgtccttcttcctgcatgggtactgagcaaagcgtatttgggtgtgacttcatcaatacgttcatttcccttgtagtaggtttcccgtacaggctcgttgatttctgccagttcgcccagctctttcaggtaatcgttcatcttctggttgctgatgacgggcagagccatgtaattctcgaaatggatgtccttgtatttgtccagtatggctttgctgtatttgttcagttcaatcgtcaggctgtcggcagtcttgactgtggttatttcgatgtggtcggacttcacatcgcttcttttcagattgcgaacatccgaataccgcaaactcgtaaagcagcagaacaggaaaacatcacgcacacgttccaggtattgcttatccttgggtatctggtagtctttcagcttgttcagttcatcccaagtcaggaagattacttttttcgaggtggttttcagtttcggtttgaacgtatcgtatgcaatgttctgatgatgtcctttcttgaagctccagcgcaggaaccatttgaggaatcccatttgcttgccgatggtgctgtttctcatatccttggtgtcacgcaggaagttgacgtattcgttcaatccaaactcgttgaaatagttgaacgttgcatcctccttgaactctttgaggtggttcctcactgctgcaaatttttcataggtggatgccgtccagttattctggttaccgcactcttttacaaactcatcgaacacctcccaaaagctgacaggggcttcttccggctgttcttcgctggtgtctttcattctcatgttgaaagcttccttcaactgttgggtcgttggcatgacctcctgcacctcaaattccttgaaaatattctggatttcggcatagtatttcagcaagtccgtattgatttcggctgcactttgctttagcttgttggtacatccgctctttacccgctgcttatctgcatcccatttggctacgtcaatccggtagcccgttgtaaactcgatgcgttggctggcaaagatgacacgcatacggatgggtacgttctctacgattggcacaccgttctttttccggctctccaatgcaaaaatgatgttgcgcttgatattcataattgggtgcgtttgaaattctacacccaaatatacacccaattattgagatagcaaaagacatttagaaacatttacttttactctatattgtaatttacacttgattatcagtcgtttgcagtcttatgatattctgtgaaagtataagttcgagagcctgtctctccgcaaaaaacgctgaaaatcagcagattgcaaaacaaacaccctgttttacacccaagaatgtaaagtcggctgtttttgttttatttaagataatacaaccactacataataaaagagtagcgatattaaaagaatccgatgagaaaagactaatatttatctatccattcagtttgatttttcaggactttacatcgtcctgaaagtatttgttggtaccggtaccgaggacgcgtaaacatttacagttgcatgtggcctattgtttttagccgttaaatattttataactattaaatagcgatacaaattgttcgaaactaatattgtttatatcatatattctcgcatgttttaaagctttattaaattgattttttgtaaacagtttttcgtactctttgttaacccatttcattacaaaagtttcatatttttttctctctttaaatgccatttttgctggctttctttttaatacaattaatgtgctatccactttaggttttggatggaaataatacctaggaatttttgctaatatagaaatatctacctctgccattaacagcaatgctagtgatctgtttgtatctaataacattttagcaaaaccatattccactattaaataacttattgtggctgaactttcaaaaacaatttttcgaattatatttgtgcttatgttgtaaggtatgctgccaaatattttatatggattgtggctaggaaatgtaaatttcagtatatcatcatttactatttgatagttaggataatttaagagcttattacgagttacctcacataatttagaatcaatttctatcgccgttacaaaattacatctctttaccaatccagcagtaaaatgacctttccctgcacctatttcaaagatgttatctttttcatctaaacttatgcaattcattattttttctatgtgatattttgaagtaataaaattttgactatcttttatatttactttgttcattataacctctccttaatttattgcatctcttttcgaatatttatgttttttgagaaaagaacgtactcatggttcatcccgatatgcgtatcggtctgtatatcagcaactttctatgtgtttcaactacaatagtcatctattctcatctttctgagtccaccccctgcaaagcccctctttacgacataaaaattcggtcggaaaaggtatgcaaaagatgtttctctctttaagagaaactcttcgggatgcaaaaatatgaaaataactccaattcaccaaattatatagcgacttttttacaaaatgctaaaatttgttgatttccgtcaagcaattgttgagcaaaaatgtcttttacgataaaatgatacctcaatatcaactgtttagcaaaacgatatttctcttaaagagagaaacacctttttgttcaccaatccccgacttttaatcccgcggccatgattgaaaaaggaagagtatgagtattcaacatttccgtgtcgcccttattcccttttttgcggcattttgccttcctgtttttgctcacccagaaacgctggtgaaagtaaaagatgctgaagatcagttgggtgcacgagtgggttacatcgaactggatctcaacagcggtaagatccttgagagttttcgccccgaagaacgttttccaatgatgagcacttttaaagttctgctatgtggcgcggtattatcccgtattgacgccgggcaagagcaactcggtcgccgcatacactattctcagaatgacttggttgagtactcaccagtcacagaaaagcatcttacggatggcatgacagtaagagaattatgcagtgctgccataaccatgagtgataacactgcggccaacttacttctgacaacgatcggaggaccgaaggagctaaccgcttttttgcacaacatgggggatcatgtaactcgccttgatcgttgggaaccggagctgaatgaagccataccaaacgacgagcgtgacaccacgatgcctgtagcaatggcaacaacgttgcgcaaactattaactggcgaactacttactctagcttcccggcaacaattaatagactggatggaggcggataaagttgcaggaccacttctgcgctcggcccttccggctggctggtttattgctgataaatctggagccggtgagcgtgggtctcgcggtatcattgcagcactggggccagatggtaagccctcccgtatcgtagttatctacacgacggggagtcaggcaactatggatgaacgaaatagacagatcgctgagataggtgcctcactgattaagcattggtaactgtcagaccaagtttactcataacgcgtcaattcgagggggatcaattccgtgataggtgggctgcccttcctggttggcttggtttcatcagccatccgcttgccctcatctgttacgccggcggtagccggccagcctcgcagagcaggattcccgttgagcaccgccaggtgcgaataagggacagtgaagaaggaacacccgctcgcgggtgggcctacttcacctatcctgcccggctgacgccgttggatacaccaaggaaagtctacacgaaccctttggcaaaatcctgtatatcgtgcgaaaaaggatggatataccgaaaaaatcgctataatgaccccgaagcagggttatgcagcggaaaacggaattgatccggccacgatgcgtccggcgtagaggatctgaagatcagcagttcaacctgttgatagtacgtactaagctctcatgtttcacgtactaagctctcatgtttaacgtactaagctctcatgtttaacgaactaaaccctcatggctaacgtactaagctctcatggctaacgtactaagctctcatgtttcacgtactaagctctcatgtttgaacaataaaattaatataaatcagcaacttaaatagcctctaaggttttaagttttataagaaaaaaaagaatatataaggcttttaaagcttttaag

SEQ ID NO: 48 - DNA, 7084 bp, synthetic construct
  misc_feature 1..7084: note = Description of sequence: pBH118
  source 1..7084: mol_type = other DNA
gtttaacggttgtggacaacaagccagggatgtaacgcactgagaagcccttagagcctctcaaagcaattttgagtgacacaggaacacttaacggctgacatgggaattcccctccaccgcggtggtacaaagaaaattcgacaaactgttatttttctatctatttatttgaattaggagcgctcctaatttacctttgtcggcaattaggagcgctcctaattaaataaagatattctcgtcaaacaaatataaataatataaacatggtttttactctggaagattttgttggcgattggcgtcagaccgcgggttataatttggatcaagtcctggaacagggtggcgtaagctctctgttccagaacctgggtgtgagcgtgacgccgattcagcgcatcgttctgtccggcgagaacggtctgaaaattgatattcatgtgatcatcccgtacgaaggcctgagcggtgaccaaatgggtcaaatcgagaaaatctttaaagtcgtctacccagttgacgatcaccacttcaaggttatcttgcattacggtacgctggtgattgatggtgtgaccccgaatatgattgactatttcggccgtccgtatgaaggcattgccgtttttgacggtaaaaagatcaccgtcaccggtaccctgtggaatggcaataagattattgacgagcgtctgattaacccggacggcagcctgctgttccgcgtgaccatcaacggtgtcacgggttggcgtctgtgcgagcgcatcctggcataatgaactgcacttgctttgataattaatgataaacaatctaaaagcactctaatcgttatcggagtgcttttagattactaatcaaattgcttctactaattgcctatcttccagtgatggaacagcatttgtgcattggctgcaacaatcagccttgatctggaagaagcaatgaaagctgctgttaagtctccgaatcaggtattgttcctgacaggtgtattcccatccggtaaacgcggatactttgcagttgatctgactcaggaataaattataaattaaggtaagaagattgtaggataagctaatgaaatagaaaaaggatgccgtcacacaacttgtcggcattcttttttgttttattagttgaaaatatagtgaaaaagttgcctaaatatgtatgttaacaaattatttgtcgtaactttgcactccaaatctgtttttaacatatggcactagtgaaaccagtaacgttatacgatgtcgcagagtatgccggtgtctctaaaagcaccgtttccctggtggtgaaccaggccagccacgtttctgcgaaaacgcgggaaaaagtggaagcggcgatggcggagctcaattacattcccaaccgcgtggcacaacaactggcgggcaaagcgtcgcataccattggcatgttgatcactgccagtaccaatcctttctattcagaactggtgcgtggcgttgaacgcagctgcttcgaacgcggttatagtctcgatctttgcaataccgaaggcgatgaacagcggatgaatcgcaatctggaaacgctgatgcaaaaacgcgttgatggcttgctgttactgtgcaccgaaacgcatcaaccttcgcgtgaaatcatgcaacgttatccgacagtgcctactgtgatgatggactgggctccgttcgatggcgacagcgatcttattcaggataactcgttgctgggcggagacttagcaacgcaatatctgatcgataaaggtcatacccgtatcgcctgtattaccggcccgctggataaaactccggcgcgcctgcggttggaaggttatcgggcggcgatgaaacgtgcgggtctcaacattcctgatggctatgaagtcactggtgattttgaatttaacggcgggtttgacgctatgcgccaactgctatcacatccgctgcgtcctcaggccgtctttaccggaaatgacgctatggctgttggcgtttaccaggcgttatatcaggcagagttacaggttccgcaggatatcgcggtgattggctatgacgatatcgaactggcaagctttatgacgccaccattaaccactatccaccaaccgaaagatgaactgggggagctggcgattgatgtactcatccatcggataacccagccgacccttcagcaacaacgattacaacttactccgattctgatggaacgcggttcggcttagctggtgaaaagaaaaaccaccctggcgcccaatacgcaaaccgcctctccccgcgcgttggccgattcattaatgcagctggcacgacaggtttcccgactggaaagcgggcagtgagctttcctcggtaccaaattccagaaaagaggcctcccgaaaggggggccttttttcgttttggtcctacttgtgcctgttctatttccgaaccgaccgcttgtatgaatccatcaaaattcgttttctctatgttggattccttgttgctcatattgtgatgataatttctacaaatatagtcattggtaactatctatgaaactgtttgatacttttatagttgattaaacttgttcatggcatttgccttaatatcatccgctatgtcaatgtagggtttcatagctttgtagtcgctgtgtcccgtccatttcatgaccacctgtgccgggattccgagagccagcgcattgcagatgaatgtccttcttcctgcatgggtactgagcaaagcgtatttgggtgtgacttcatcaatacgttcatttcccttgtagtaggtttcccgtacaggctcgttgatttctgccagttcgcccagctctttcaggtaatcgttcatcttctggttgctgatgacgggcagagccatgtaattctcgaaatggatgtccttgtatttgtccagtatggctttgctgtatttgttcagttcaatcgtcaggctgtcggcagtcttgactgtggttatttcgatgtggtcggacttcacatcgcttcttttcagattgcgaacatccgaataccgcaaactcgtaaagcagcagaacaggaaaacatcacgcacacgttccaggtattgcttatccttgggtatctggtagtctttcagcttgttcagttcatcccaagtcaggaagattacttttttcgaggtggttttcagtttcggtttgaacgtatcgtatgcaatgttctgatgatgtcctttcttgaagctccagcgcaggaaccatttgaggaatcccatttgcttgccgatggtgctgtttctcatatccttggtgtcacgcaggaagttgacgtattcgttcaatccaaactcgttgaaatagttgaacgttgcatcctccttgaactctttgaggtggttcctcactgctgcaaatttttcataggtggatgccgtccagttattctggttaccgcactcttttacaaactcatcgaacacctcccaaaagctgacaggggcttcttccggctgttcttcgctggtgtctttcattctcatgttgaaagcttccttcaactgttgggtcgttggcatgacctcctgcacctcaaattccttgaaaatattctggatttcggcatagtatttcagcaagtccgtattgatttcggctgcactttgctttagcttgttggtacatccgctctttacccgctgcttatctgcatcccatttggctacgtcaatccggtagcccgttgtaaactcgatgcgttggctggcaaagatgacacgcatacggatgggtacgttctctacgattggcacaccgttctttttccggctctccaatgcaaaaatgatgttgcgcttgatattcataattgggtgcgtttgaaattctacacccaaatatacacccaattattgagatagcaaaagacatttagaaacatttacttttactctatattgtaatttacacttgattatcagtcgtttgcagtcttatgatattctgtgaaagtataagttcgagagcctgtctctccgcaaaaaacgctgaaaatcagcagattgcaaaacaaacaccctgttttacacccaagaatgtaaagtcggctgtttttgttttatttaagataatacaaccactacataataaaagagtagcgatattaaaagaatccgatgagaaaagactaatatttatctatccattcagtttgatttttcaggactttacatcgtcctgaaagtatttgttggtaccggtaccgaggacgcgtaaacatttacagttgcatgtggcctattgtttttagccgttaaatattttataactattaaatagcgatacaaattgttcgaaactaatattgtttatatcatatattctcgcatgttttaaagctttattaaattgattttttgtaaacagtttttcgtactctttgttaacccatttcattacaaaagtttcatatttttttctctctttaaatgccatttttgctggctttctttttaatacaattaatgtgctatccactttaggttttggatggaaataatacctaggaatttttgctaatatagaaatatctacctctgccattaacagcaatgctagtgatctgtttgtatctaataacattttagcaaaaccatattccactattaaataacttattgtggctgaactttcaaaaacaatttttcgaattatatttgtgcttatgttgtaaggtatgctgccaaatattttatatggattgtggctaggaaatgtaaatttcagtatatcatcatttactatttgatagttaggataatttaagagcttattacgagttacctcacataatttagaatcaatttctatcgccgttacaaaattacatctctttaccaatccagcagtaaaatgacctttccctgcacctatttcaaagatgttatctttttcatctaaacttatgcaattcattattttttctatgtgatattttgaagtaataaaattttgactatcttttatatttactttgttcattataacctctccttaatttattgcatctcttttcgaatatttatgttttttgagaaaagaacgtactcatggttcatcccgatatgcgtatcggtctgtatatcagcaactttctatgtgtttcaactacaatagtcatctattctcatctttctgagtccaccccctgcaaagcccctctttacgacataaaaattcggtcggaaaaggtatgcaaaagatgtttctctctttaagagaaactcttcgggatgcaaaaatatgaaaataactccaattcaccaaattatatagcgacttttttacaaaatgctaaaatttgttgatttccgtcaagcaattgttgagcaaaaatgtcttttacgataaaatgatacctcaatatcaactgtttagcaaaacgatatttctcttaaagagagaaacacctttttgttcaccaatccccgacttttaatcccgcggccatgattgaaaaaggaagagtatgagtattcaacatttccgtgtcgcccttattcccttttttgcggcattttgccttcctgtttttgctcacccagaaacgctggtgaaagtaaaagatgctgaagatcagttgggtgcacgagtgggttacatcgaactggatctcaacagcggtaagatccttgagagttttcgccccgaagaacgttttccaatgatgagcacttttaaagttctgctatgtggcgcggtattatcccgtattgacgccgggcaagagcaactcggtcgccgcatacactattctcagaatgacttggttgagtactcaccagtcacagaaaagcatcttacggatggcatgacagtaagagaattatgcagtgctgccataaccatgagtgataacactgcggccaacttacttctgacaacgatcggaggaccgaaggagctaaccgcttttttgcacaacatgggggatcatgtaactcgccttgatcgttgggaaccggagctgaatgaagccataccaaacgacgagcgtgacaccacgatgcctgtagcaatggcaacaacgttgcgcaaactattaactggcgaactacttactctagcttcccggcaacaattaatagactggatggaggcggataaagttgcaggaccacttctgcgctcggcccttccggctggctggtttattgctgataaatctggagccggtgagcgtgggtctcgcggtatcattgcagcactggggccagatggtaagccctcccgtatcgtagttatctacacgacggggagtcaggcaactatggatgaacgaaatagacagatcgctgagataggtgcctcactgattaagcattggtaactgtcagaccaagtttactcataacgcgtcaattcgagggggatcaattccgtgataggtgggctgcccttcctggttggcttggtttcatcagccatccgcttgccctcatctgttacgccggcggtagccggccagcctcgcagagcaggattcccgttgagcaccgccaggtgcgaataagggacagtgaagaaggaacacccgctcgcgggtgggcctacttcacctatcctgcccggctgacgccgttggatacaccaaggaaagtctacacgaaccctttggcaaaatcctgtatatcgtgcgaaaaaggatggatataccgaaaaaatcgctataatgaccccgaagcagggttatgcagcggaaaacggaattgatccggccacgatgcgtccggcgtagaggatctgaagatcagcagttcaacctgttgatagtacgtactaagctctcatgtttcacgtactaagctctcatgtttaacgtactaagctctcatgtttaacgaactaaaccctcatggctaacgtactaagctctcatggctaacgtactaagctctcatgtttcacgtactaagctctcatgtttgaacaataaaattaatataaatcagcaacttaaatagcctctaaggttttaagttttataagaaaaaaaagaatatataaggcttttaaagcttttaag

SEQ ID NO: 49 - DNA, 7084 bp, synthetic construct
  misc_feature 1..7084: note = Description of sequence: pBH119
  source 1..7084: mol_type = other DNA
gtttaacggttgtggacaacaagccagggatgtaacgcactgagaagcccttagagcctctcaaagcaattttgagtgacacaggaacacttaacggctgacatgggaattcccctccaccgcggtggtacaaagaaaattcgacaaactgttatttttctatctatttatttgaattttgagcgctcaaaatttacctttgtcggcaattttgagcgctcaaaattaaataaagatattctcgtcaaacaaatataaataatataaacatggtttttactctggaagattttgttggcgattggcgtcagaccgcgggttataatttggatcaagtcctggaacagggtggcgtaagctctctgttccagaacctgggtgtgagcgtgacgccgattcagcgcatcgttctgtccggcgagaacggtctgaaaattgatattcatgtgatcatcccgtacgaaggcctgagcggtgaccaaatgggtcaaatcgagaaaatctttaaagtcgtctacccagttgacgatcaccacttcaaggttatcttgcattacggtacgctggtgattgatggtgtgaccccgaatatgattgactatttcggccgtccgtatgaaggcattgccgtttttgacggtaaaaagatcaccgtcaccggtaccctgtggaatggcaataagattattgacgagcgtctgattaacccggacggcagcctgctgttccgcgtgaccatcaacggtgtcacgggttggcgtctgtgcgagcgcatcctggcataatgaactgcacttgctttgataattaatgataaacaatctaaaagcactctaatcgttatcggagtgcttttagattactaatcaaattgcttctactaattgcctatcttccagtgatggaacagcatttgtgcattggctgcaacaatcagccttgatctggaagaagcaatgaaagctgctgttaagtctccgaatcaggtattgttcctgacaggtgtattcccatccggtaaacgcggatactttgcagttgatctgactcaggaataaattataaattaaggtaagaagattgtaggataagctaatgaaatagaaaaaggatgccgtcacacaacttgtcggcattcttttttgttttattagttgaaaatatagtgaaaaagttgcctaaatatgtatgttaacaaattatttgtcgtaactttgcactccaaatctgtttttaacatatggcactagtgaaaccagtaacgttatacgatgtcgcagagtatgccggtgtctctcatcagaccgtttccaatgtggtgaaccaggccagccacgtttctgcgaaaacgcgggaaaaagtggaagcggcgatggcggagctcaattacattcccaaccgcgtggcacaacaactggcgggcaaagcgtcgcataccattggcatgttgatcactgccagtaccaatcctttctattcagaactggtgcgtggcgttgaacgcagctgcttcgaacgcggttatagtctcgatctttgcaataccgaaggcgatgaacagcggatgaatcgcaatctggaaacgctgatgcaaaaacgcgttgatggcttgctgttactgtgcaccgaaacgcatcaaccttcgcgtgaaatcatgcaacgttatccgacagtgcctactgtgatgatggactgggctccgttcgatggcgacagcgatcttattcaggataactcgttgctgggcggagacttagcaacgcaatatctgatcgataaaggtcatacccgtatcgcctgtattaccggcccgctggataaaactccggcgcgcctgcggttggaaggttatcgggcggcgatgaaacgtgcgggtctcaacattcctgatggctatgaagtcactggtgattttgaatttaacggcgggtttgacgctatgcgccaactgctatcacatccgctgcgtcctcaggccgtctttaccggaaatgacgctatggctgttggcgtttaccaggcgttatatcaggcagagttacaggttccgcaggatatcgcggtgattggctatgacgatatcgaactggcaagctttatgacgccaccattaaccactatccaccaaccgaaagatgaactgggggagctggcgattgatgtactcatccatcggataacccagccgacccttcagcaacaacgattacaacttactccgattctgatggaacgcggttcggcttagctggtgaaaagaaaaaccaccctggcgcccaatacgcaaaccgcctctccccgcgcgttggccgattcattaatgcagctggcacgacaggtttcccgactggaaagcgggcagtgagctttcctcggtaccaaattccagaaaagaggcctcccgaaaggggggccttttttcgttttggtcctacttgtgcctgttctatttccgaaccgaccgcttgtatgaatccatcaaaattcgttttctctatgttggattccttgttgctcatattgtgatgataatttctacaaatatagtcattggtaactatctatgaaactgtttgatacttttatagttgattaaacttgttcatggcatttgccttaatatcatccgctatgtcaatgtagggtttcatagctttgtagtcgctgtgtcccgtccatttcatgaccacctgtgccgggattccgagagccagcgcattgcagatgaatgtccttcttcctgcatgggtactgagcaaagcgtatttgggtgtgacttcatcaatacgttcatttcccttgtagtaggtttcccgtacaggctcgttgatttctgccagttcgcccagctctttcaggtaatcgttcatcttctggttgctgatgacgggcagagccatgtaattctcgaaatggatgtccttgtatttgtccagtatggctttgctgtatttgttcagttcaatcgtcaggctgtcggcagtcttgactgtggttatttcgatgtggtcggacttcacatcgcttcttttcagattgcgaacatccgaataccgcaaactcgtaaagcagcagaacaggaaaacatcacgcacacgttccaggtattgcttatccttgggtatctggtagtctttcagcttgttcagttcatcccaagtcaggaagattacttttttcgaggtggttttcagtttcggtttgaacgtatcgtatgcaatgttctgatgatgtcctttcttgaagctccagcgcaggaaccatttgaggaatcccatttgcttgccgatggtgctgtttctcatatccttggtgtcacgcaggaagttgacgtattcgttcaatccaaactcgttgaaatagttgaacgttgcatcctccttgaactctttgaggtggttcctcactgctgcaaatttttcataggtggatgccgtccagttattctggttaccgcactcttttacaaactcatcgaacacctcccaaaagctgacaggggcttcttccggctgttcttcgctggtgtctttcattctcatgttgaaagcttccttcaactgttgggtcgttggcatgacctcctgcacctcaaattccttgaaaatattctggatttcggcatagtatttcagcaagtccgtattgatttcggctgcactttgctttagcttgttggtacatccgctctttacccgctgcttatctgcatcccatttggctacgtcaatccggtagcccgttgtaaactcgatgcgttggctggcaaagatgacacgcatacggatgggtacgttctctacgattggcacaccgttctttttccggctctccaatgcaaaaatgatgttgcgcttgatattcataattgggtgcgtttgaaattctacacccaaatatacacccaattattgagatagcaaaagacatttagaaacatttacttttactctatattgtaatttacacttgattatcagtcgtttgcagtcttatgatattctgtgaaagtataagttcgagagcctgtctctccgcaaaaaacgctgaaaatcagcagattgcaaaacaaacaccctgttttacacccaagaatgtaaagtcggctgtttttgttttatttaagataatacaaccactacataataaaagagtagcgatattaaaagaatccgatgagaaaagactaatatttatctatccattcagtttgatttttcaggactttacatcgtcctgaaagtatttgttggtaccggtaccgaggacgcgtaaacatttacagttgcatgtggcctattgtttttagccgttaaatattttataactattaaatagcgatacaaattgttcgaaactaatattgtttatatcatatattctcgcatgttttaaagctttattaaattgattttttgtaaacagtttttcgtactctttgttaacccatttcattacaaaagtttcatatttttttctctctttaaatgccatttttgctggctttctttttaatacaattaatgtgctatccactttaggttttggatggaaataatacctaggaatttttgctaatatagaaatatctacctctgccattaacagcaatgctagtgatctgtttgtatctaataacattttagcaaaaccatattccactattaaataacttattgtggctgaactttcaaaaacaatttttcgaattatatttgtgcttatgttgtaaggtatgctgccaaatattttatatggattgtggctaggaaatgtaaatttcagtatatcatcatttactatttgatagttaggataatttaagagcttattacgagttacctcacataatttagaatcaatttctatcgccgttacaaaattacatctctttaccaatccagcagtaaaatgacctttccctgcacctatttcaaagatgttatctttttcatctaaacttatgcaattcattattttttctatgtgatattttgaagtaataaaattttgactatcttttatatttactttgttcattataacctctccttaatttattgcatctcttttcgaatatttatgttttttgagaaaagaacgtactcatggttcatcccgatatgcgtatcggtctgtatatcagcaactttctatgtgtttcaactacaatagtcatctattctcatctttctgagtccaccccctgcaaagcccctctttacgacataaaaattcggtcggaaaaggtatgcaaaagatgtttctctctttaagagaaactcttcgggatgcaaaaatatgaaaataactccaattcaccaaattatatagcgacttttttacaaaatgctaaaatttgttgatttccgtcaagcaattgttgagcaaaaatgtcttttacgataaaatgatacctcaatatcaactgtttagcaaaacgatatttctcttaaagagagaaacacctttttgttcaccaatccccgacttttaatcccgcggccatgattgaaaaaggaagagtatgagtattcaacatttccgtgtcgcccttattcccttttttgcggcattttgccttcctgtttttgctcacccagaaacgctggtgaaagtaaaagatgctgaagatcagttgggtgcacgagtgggttacatcgaactggatctcaacagcggtaagatccttgagagttttcgccccgaagaacgttttccaatgatgagcacttttaaagttctgctatgtggcgcggtattatcccgtattgacgccgggcaagagcaactcggtcgccgcatacactattctcagaatgacttggttgagtactcaccagtcacagaaaagcatcttacggatggcatgacagtaagagaattatgcagtgctgccataaccatgagtgataacactgcggccaacttacttctgacaacgatcggaggaccgaaggagctaaccgcttttttgcacaacatgggggatcatgtaactcgccttgatcgttgggaaccggagctgaatgaagccataccaaacgacgagcgtgacaccacgatgcctgtagcaatggcaacaacgttgcgcaaactattaactggcgaactacttactctagcttcccggcaacaattaatagactggatggaggcggataaagttgcaggaccacttctgcgctcggcccttccggctggctggtttattgctgataaatctggagccggtgagcgtgggtctcgcggtatcattgcagcactggggccagatggtaagccctcccgtatcgtagttatctacacgacggggagtcaggcaactatggatgaacgaaatagacagatcgctgagataggtgcctcactgattaagcattggtaactgtcagaccaagtttactcataacgcgtcaattcgagggggatcaattccgtgataggtgggctgcccttcctggttggcttggtttcatcagccatccgcttgccctcatctgttacgccggcggtagccggccagcctcgcagagcaggattcccgttgagcaccgccaggtgcgaataagggacagtgaagaaggaacacccgctcgcgggtgggcctacttcacctatcctgcccggctgacgccgttggatacaccaaggaaagtctacacgaaccctttggcaaaatcctgtatatcgtgcgaaaaaggatggatataccgaaaaaatcgctataatgaccccgaagcagggttatgcagcggaaaacggaattgatccggccacgatgcgtccggcgtagaggatctgaagatcagcagttcaacctgttgatagtacgtactaagctctcatgtttcacgtactaagctctcatgtttaacgtactaagctctcatgtttaacgaactaaaccctcatggctaacgtactaagctctcatggctaacgtactaagctctcatgtttcacgtactaagctctcatgtttgaacaataaaattaatataaatcagcaacttaaatagcctctaaggttttaagttttataagaaaaaaaagaatatataaggcttttaaagcttttaag

SEQ ID NO: 50 - DNA, 7084 bp, synthetic construct
  misc_feature 1..7084: note = Description of sequence: pBH120
  source 1..7084: mol_type = other DNA
gtttaacggttgtggacaacaagccagggatgtaacgcactgagaagcccttagagcctctcaaagcaattttgagtgacacaggaacacttaacggctgacatgggaattcccctccaccgcggtggtacaaagaaaattcgacaaactgttatttttctatctatttatttgaattgacagcgctgtcaatttacctttgtcggcaattgacagcgctgtcaattaaataaagatattctcgtcaaacaaatataaataatataaacatggtttttactctggaagattttgttggcgattggcgtcagaccgcgggttataatttggatcaagtcctggaacagggtggcgtaagctctctgttccagaacctgggtgtgagcgtgacgccgattcagcgcatcgttctgtccggcgagaacggtctgaaaattgatattcatgtgatcatcccgtacgaaggcctgagcggtgaccaaatgggtcaaatcgagaaaatctttaaagtcgtctacccagttgacgatcaccacttcaaggttatcttgcattacggtacgctggtgattgatggtgtgaccccgaatatgattgactatttcggccgtccgtatgaaggcattgccgtttttgacggtaaaaagatcaccgtcaccggtaccctgtggaatggcaataagattattgacgagcgtctgattaacccggacggcagcctgctgttccgcgtgaccatcaacggtgtcacgggttggcgtctgtgcgagcgcatcctggcataatgaactgcacttgctttgataattaatgataaacaatctaaaagcactctaatcgttatcggagtgcttttagattactaatcaaattgcttctactaattgcctatcttccagtgatggaacagcatttgtgcattggctgcaacaatcagccttgatctggaagaagcaatgaaagctgctgttaagtctccgaatcaggtattgttcctgacaggtgtattcccatccggtaaacgcggatactttgcagttgatctgactcaggaataaattataaattaaggtaagaagattgtaggataagctaatgaaatagaaaaaggatgccgtcacacaacttgtcggcattcttttttgttttattagttgaaaatatagtgaaaaagttgcctaaatatgtatgttaacaaattatttgtcgtaactttgcactccaaatctgtttttaacatatggcactagtgaaaccagtaacgttatacgatgtcgcagagtatgccggtgtctctggaaagaccgtttcccgcgtggtgaaccaggccagccacgtttctgcgaaaacgcgggaaaaagtggaagcggcgatggcggagctcaattacattcccaaccgcgtggcacaacaactggcgggcaaagcgtcgcataccattggcatgttgatcactgccagtaccaatcctttctattcagaactggtgcgtggcgttgaacgcagctgcttcgaacgcggttatagtctcgatctttgcaataccgaaggcgatgaacagcggatgaatcgcaatctggaaacgctgatgcaaaaacgcgttgatggcttgctgttactgtgcaccgaaacgcatcaaccttcgcgtgaaatcatgcaacgttatccgacagtgcctactgtgatgatggactgggctccgttcgatggcgacagcgatcttattcaggataactcgttgctgggcggagacttagcaacgcaatatctgatcgataaaggtcatacccgtatcgcctgtattaccggcccgctggataaaactccggcgcgcctgcggttggaaggttatcgggcggcgatgaaacgtgcgggtctcaacattcctgatggctatgaagtcactggtgattttgaatttaacggcgggtttgacgctatgcgccaactgctatcacatccgctgcgtcctcaggccgtctttaccggaaatgacgctatggctgttggcgtttaccaggcgttatatcaggcagagttacaggttccgcaggatatcgcggtgattggctatgacgatatcgaactggcaagctttatgacgccaccattaaccactatccaccaaccgaaagatgaactgggggagctggcgattgatgtactcatccatcggataacccagccgacccttcagcaacaacgattacaacttactccgattctgatggaacgcggttcggcttagctggtgaaaagaaaaaccaccctggcgcccaatacgcaaaccgcctctccccgcgcgttggccgattcattaatgcagctggcacgacaggtttcccgactggaaagcgggcagtgagctttcctcggtaccaaattccagaaaagaggcctcccgaaaggggggccttttttcgttttggtcctacttgtgcctgttctatttccgaaccgaccgcttgtatgaatccatcaaaattcgttttctctatgttggattccttgttgctcatattgtgatgataatttctacaaatatagtcattggtaactatctatgaaactgtttgatacttttatagttgattaaacttgttcatggcatttgccttaatatcatccgctatgtcaatgtagggtttcatagctttgtagtcgctgtgtcccgtccatttcatgaccacctgtgccgggattccgagagccagcgcattgcagatgaatgtccttcttcctgcatgggtactgagcaaagcgtatttgggtgtgacttcatcaatacgttcatttcccttgtagtaggtttcccgtacaggctcgttgatttctgccagttcgcccagctctttcaggtaatcgttcatcttctggttgctgatgacgggcagagccatgtaattctcgaaatggatgtccttgtatttgtccagtatggctttgctgtatttgttcagttcaatcgtcaggctgtcggcagtcttgactgtggttatttcgatgtggtcggacttcacatcgcttcttttcagattgcgaacatccgaataccgcaaactcgtaaagcagcagaacaggaaaacatcacgcacacgttccaggtattgcttatccttgggtatctggtagtctttcagcttgttcagttcatcccaagtcaggaagattacttttttcgaggtggttttcagtttcggtttgaacgtatcgtatgcaatgttctgatgatgtcctttcttgaagctccagcgcaggaaccatttgaggaatcccatttgcttgccgatggtgctgtttctcatatccttggtgtcacgcaggaagttgacgtattcgttcaatccaaactcgttgaaatagttgaacgttgcatcctccttgaactctttgaggtggttcctcactgctgcaaatttttcataggtggatgccgtccagttattctggttaccgcactcttttacaaactcatcgaacacctcccaaaagctgacaggggcttcttccggctgttcttcgctggtgtctttcattctcatgttgaaagcttccttcaactgttgggtcgttggcatgacctcctgcacctcaaattccttgaaaatattctggatttcggcatagtatttcagcaagtccgtattgatttcggctgcactttgctttagcttgttggtacatccgctctttacccgctgcttatctgcatcccatttggctacgtcaatccggtagcccgttgtaaactcgatgcgttggctggcaaagatgacacgcatacggatgggtacgttctctacgattggcacaccgttctttttccggctctccaatgcaaaaatgatgttgcgcttgatattcataattgggtgcgtttgaaattctacacccaaatatacacccaattattgagatagcaaaagacatttagaaacatttacttttactctatattgtaatttacacttgattatcagtcgtttgcagtcttatgatattctgtgaaagtataagttcgagagcctgtctctccgcaaaaaacgctgaaaatcagcagattgcaaaacaaacaccctgttttacacccaagaatgtaaagtcggctgtttttgttttatttaagataatacaaccactacataataaaagagtagcgatattaaaagaatccgatgagaaaagactaatatttatctatccattcagtttgatttttcaggactttacatcgtcctgaaagtatttgttggtaccggtaccgaggacgcgtaaacatttacagttgcatgtggcctattgtttttagccgttaaatattttataactattaaatagcgatacaaattgttcgaaactaatattgtttatatcatatattctcgcatgttttaaagctttattaaattgattttttgtaaacagtttttcgtactctttgttaacccatttcattacaaaagtttcatatttttttctctctttaaatgccatttttgctggctttctttttaatacaattaatgtgctatccactttaggttttggatggaaataatacctaggaatttttgctaatatagaaatatctacctctgccattaacagcaatgctagtgatctgtttgtatctaataacattttagcaaaaccatattccactattaaataacttattgtggctgaactttcaaaaacaatttttcgaattatatttgtgcttatgttgtaaggtatgctgccaaatattttatatggattgtggctaggaaatgtaaatttcagtatatcatcatttactatttgatagttaggataatttaagagcttattacgagttacctcacataatttagaatcaatttctatcgccgttacaaaattacatctctttaccaatccagcagtaaaatgacctttccctgcacctatttcaaagatgttatctttttcatctaaacttatgcaattcattattttttctatgtgatattttgaagtaataaaattttgactatcttttatatttactttgttcattataacctctccttaatttattgcatctcttttcgaatatttatgttttttgagaaaagaacgtactcatggttcatcccgatatgcgtatcggtctgtatatcagcaactttctatgtgtttcaactacaatagtcatctattctcatctttctgagtccaccccctgcaaagcccctctttacgacataaaaattcggtcggaaaaggtatgcaaaagatgtttctctctttaagagaaactcttcgggatgcaaaaatatgaaaataactccaattcaccaaattatatagcgacttttttacaaaatgctaaaatttgttgatttccgtcaagcaattgttgagcaaaaatgtcttttacgataaaatgatacctcaatatcaactgtttagcaaaacgatatttctcttaaagagagaaacacctttttgttcaccaatccccgacttttaatcccgcggccatgattgaaaaaggaagagtatgagtattcaacatttccgtgtcgcccttattcccttttttgcggcattttgccttcctgtttttgctcacccagaaacgctggtgaaagtaaaagatgctgaagatcagttgggtgcacgagtgggttacatcgaactggatctcaacagcggtaagatccttgagagttttcgccccgaagaacgttttccaatgatgagcacttttaaagttctgctatgtggcgcggtattatcccgtattgacgccgggcaagagcaactcggtcgccgcatacactattctcagaatgacttggttgagtactcaccagtcacagaaaagcatcttacggatggcatgacagtaagagaattatgcagtgctgccataaccatgagtgataacactgcggccaacttacttctgacaacgatcggaggaccgaaggagctaaccgcttttttgcacaacatgggggatcatgtaactcgccttgatcgttgggaaccggagctgaatgaagccataccaaacgacgagcgtgacaccacgatgcctgtagcaatggcaacaacgttgcgcaaactattaactggcgaactacttactctagcttcccggcaacaattaatagactggatggaggcggataaagttgcaggaccacttctgcgctcggcccttccggctggctggtttattgctgataaatctggagccggtgagcgtgggtctcgcggtatcattgcagcactggggccagatggtaagccctcccgtatcgtagttatctacacgacggggagtcaggcaactatggatgaacgaaatagacagatcgctgagataggtgcctcactgattaagcattggtaactgtcagaccaagtttactcataacgcgtcaattcgagggggatcaattccgtgataggtgggctgcccttcctggttggcttggtttcatcagccatccgcttgccctcatctgttacgccggcggtagccggccagcctcgcagagcaggattcccgttgagcaccgccaggtgcgaataagggacagtgaagaaggaacacccgctcgcgggtgggcctacttcacctatcctgcccggctgacgccgttggatacaccaaggaaagtctacacgaaccctttggcaaaatcctgtatatcgtgcgaaaaaggatggatataccgaaaaaatcgctataatgaccccgaagcagggttatgcagcggaaaacggaattgatccggccacgatgcgtccggcgtagaggatctgaagatcagcagttcaacctgttgatagtacgtactaagctctcatgtttcacgtactaagctctcatgtttaacgtactaagctctcatgtttaacgaactaaaccctcatggctaacgtactaagctctcatggctaacgtactaagctctcatgtttcacgtactaagctctcatgtttgaacaataaaattaatataaatcagcaacttaaatagcctctaaggttttaagttttataagaaaaaaaagaatatataaggcttttaaagcttttaag

SEQ ID NO: 51 - DNA, 8544 bp, synthetic construct
  misc_feature 1..8544: note = Description of sequence: Pbh201
  source 1..8544: mol_type = other DNA
gtttaacggttgtggacaacaagccagggatgtaacgcactgagaagcccttagagcctctcaaagcaattttgagtgacacaggaacacttaacggctgacatgggaattcccctccaccgcggtggtacaaagaaaattcgacaaactgttatttttctatctatttatttgaattgtgagcggataacaattacctttgtcggcaattgtgagcggataacaattaaataaagatattctcgtcaaacaaatataaataatataaacatggtttttactctggaagattttgttggcgattggcgtcagaccgcgggttataatttggatcaagtcctggaacagggtggcgtaagctctctgttccagaacctgggtgtgagcgtgacgccgattcagcgcatcgttctgtccggcgagaacggtctgaaaattgatattcatgtgatcatcccgtacgaaggcctgagcggtgaccaaatgggtcaaatcgagaaaatctttaaagtcgtctacccagttgacgatcaccacttcaaggttatcttgcattacggtacgctggtgattgatggtgtgaccccgaatatgattgactatttcggccgtccgtatgaaggcattgccgtttttgacggtaaaaagatcaccgtcaccggtaccctgtggaatggcaataagattattgacgagcgtctgattaacccggacggcagcctgctgttccgcgtgaccatcaacggtgtcacgggttggcgtctgtgcgagcgcatcctggcataatgaactgcacttgctttgataattaatgataaacaatctaaaagcactctaatcgttatcggagtgcttttagattactaatcaaattgcttctactaattgcctatcttccagtgatggaacagcatttgtgcattggctgcaacaatcagccttgatctggaagaagcaatgaaagctgctgttaagtctccgaatcaggtattgttcctgacaggtgtattcccatccggtaaacgcggatactttgcagttgatctgactcaggaataaattataaattaaggtaagaagattgtaggataagctaatgaaatagaaaaaggatgccgtcacacaacttgtcggcattcttttttgttttattagttgaaaatatagtgaaaaagttgcctaaatatgtatgttaacaaattatttgtcgtaactttgcactccaaatctgtttttaacatatggcactagtgaaaccagtaacgttatacgatgtcgcagagtatgccggtgtctcttatcagaccgtttcccgcgtggtgaaccaggccagccacgtttctgcgaaaacgcgggaaaaagtggaagcggcgatggcggagctgaattacattcccaaccgcgtggcacaacaactggcgggcaaacagtcgttgctgattggcgttgccacctccagtctggccctgcacgcgccgtcgcaaattgtcgcggcgattaaatctcgcgccgatcaactgggtgccagcgtggtggtgtcgatggtagaacgaagcggcgtcgaagcctgtaaaacggcggtgcacaatcttctcgcgcaacgcgtcagtgggctgatcattaactatccgctggatgaccaggatgccattgctgtggaagctgcctgcactaatgttccggcgttatttcttgatgtctctgaccagacacccatcaacagtattattttctcccatgaagacggtacgcgactgggcgtggagcatctggtcgcattgggtcaccagcaaatcgcgctgttagcgggcccattaagttctgtctcggcgcgtctgcgtctggctggctggcataaatatctcactcgcaatcaaattcagccgatagcggaacgggaaggcgactggagtgccatgtccggttttcaacaaaccatgcaaatgctgaatgagggcatcgttcccactgcgatgctggttgccaacgatcagatggcgctgggcgcaatgcgcgccattaccgagtccgggctgcgcgttggtgcggatatctcggtagtgggatacgacgataccgaagacagctcatgttatatcccgccgttaaccaccatcaaacaggattttcgcctgctggggcaaaccagcgtggaccgcttgctgcaactctctcagggccaggcggtgaagggcaatcagctgttgcccgtctcactggtgaaaagaaaaaccaccctggcgcccaatacgcaaaccgcctctccccgcgcgttggccgattcattaatgcagctggcacgacaggtttcccgactggaaagcgggcagtgagctttcctcggtaccaaattccagaaaagaggcctcccgaaaggggggccttttttcgttttggtcctacttgtgcctgttctatttccgaaccgaccgcttgtatgaatccatcaaaattcgttttctctatgttggattccttgtttgatctggaagaagcaatgaaagctgctgttaagtctccgaatcaggtattgttcctgacaggtgtattcccatccggtaaacgcggatactttgcagttgatctgactcaggaataaattataaattaaggtaagaagattgtaggataagctaatgaaatagaaaaaggatgccgtcacacaacttgtcggcattcttttttgttttattagttgaaaatatagtgaaaaagttgcctaaatatgtatgttaacaaattatttgtcgtaactttgcactccaaatctgtttttaacatatggcactagtgaaaccagtaacgttatacgatgtcgcagagtatgccggtgtctcttatcagaccgtttcccgcgtggtgaaccaggccagccacgtttctgcgaaaacgcgggaaaaagtggaagcggcgatggcggagctcaattacattcccaaccgcgtggcacaacaactggcgggcaaagcgtcgcataccattggcatgttgatcactgccagtaccaatcctttctattcagaactggtgcgtggcgttgaacgcagctgcttcgaacgcggttatagtctcgtcctttgcaataccgaaggcgatgaacagcggatgaatcgcaatctggaaacgctgatgcaaaaacgcgttgatggcttgctgttactgtgcaccgaaacgcatcaaccttcgcgtgaaatcatgcaacgttatccgacagtgcctactgtgatgatggactgggctccgttcgatggcgacagcgatcttattcaggataactcgttgctgggcggagacttagcaacgcaatatctgatcgataaaggtcatacccgtatcgcctgtattaccggcccgctggataaaactccggcgcgcctgcggttggaaggttatcgggcggcgatgaaacgtgcgggtctcaacattcctgatggctatgaagtcactggtgattttgaatttaacggcgggtttgacgctatgcgccaactgctatcacatccgctgcgtcctcaggccgtctttaccggaaatgacgctatggctgttggcgtttaccaggcgttatatcaggcagagttacaggttccgcaggatatcgcggtgattggctatgacgatatcgaactggcaagctttatgacgccaccattaaccactatccaccaaccgaaagatgaactgggggagctggcgattgatgtactcatccatcggataacccagccgacccttcagcaacaacgattacaacttactccgattctgatggaacgcggttcggcttagctggtgaaaagaaaaaccaccctggcgcccaatacgcaaaccgcctctccccgcgcgttggccgattcattaatgcagctggcacgacaggtttcccgactggaaagcgggcagtgagctttcctcggtaccaaattccagaaaagaggcctcccgaaaggggggccttttttcgttttggtccgctcatattgtgatgataatttctacaaatatagtcattggtaactatctatgaaactgtttgatacttttatagttgattaaacttgttcatggcatttgccttaatatcatccgctatgtcaatgtagggtttcatagctttgtagtcgctgtgtcccgtccatttcatgaccacctgtgccgggattccgagagccagcgcattgcagatgaatgtccttcttcctgcatgggtactgagcaaagcgtatttgggtgtgacttcatcaatacgttcatttcccttgtagtaggtttcccgtacaggctcgttgatttctgccagttcgcccagctctttcaggtaatcgttcatcttctggttgctgatgacgggcagagccatgtaattctcgaaatggatgtccttgtatttgtccagtatggctttgctgtatttgttcagttcaatcgtcaggctgtcggcagtcttgactgtggttatttcgatgtggtcggacttcacatcgcttcttttcagattgcgaacatccgaataccgcaaactcgtaaagcagcagaacaggaaaacatcacgcacacgttccaggtattgcttatccttgggtatctggtagtctttcagcttgttcagttcatcccaagtcaggaagattacttttttcgaggtggttttcagtttcggtttgaacgtatcgtatgcaatgttctgatgatgtcctttcttgaagctccagcgcaggaaccatttgaggaatcccatttgcttgccgatggtgctgtttctcatatccttggtgtcacgcaggaagttgacgtattcgttcaatccaaactcgttgaaatagttgaacgttgcatcctccttgaactctttgaggtggttcctcactgctgcaaatttttcataggtggatgccgtccagttattctggttaccgcactcttttacaaactcatcgaacacctcccaaaagctgacaggggcttcttccggctgttcttcgctggtgtctttcattctcatgttgaaagcttccttcaactgttgggtcgttggcatgacctcctgcacctcaaattccttgaaaatattctggatttcggcatagtatttcagcaagtccgtattgatttcggctgcactttgctttagcttgttggtacatccgctctttacccgctgcttatctgcatcccatttggctacgtcaatccggtagcccgttgtaaactcgatgcgttggctggcaaagatgacacgcatacggatgggtacgttctctacgattggcacaccgttctttttccggctctccaatgcaaaaatgatgttgcgcttgatattcataattgggtgcgtttgaaattctacacccaaatatacacccaattattgagatagcaaaagacatttagaaacatttacttttactctatattgtaatttacacttgattatcagtcgtttgcagtcttatgatattctgtgaaagtataagttcgagagcctgtctctccgcaaaaaacgctgaaaatcagcagattgcaaaacaaacaccctgttttacacccaagaatgtaaagtcggctgtttttgttttatttaagataatacaaccactacataataaaagagtagcgatattaaaagaatccgatgagaaaagactaatatttatctatccattcagtttgatttttcaggactttacatcgtcctgaaagtatttgttggtaccggtaccgaggacgcgtaaacatttacagttgcatgtggcctattgtttttagccgttaaatattttataactattaaatagcgatacaaattgttcgaaactaatattgtttatatcatatattctcgcatgttttaaagctttattaaattgattttttgtaaacagtttttcgtactctttgttaacccatttcattacaaaagtttcatatttttttctctctttaaatgccatttttgctggctttctttttaatacaattaatgtgctatccactttaggttttggatggaaataatacctaggaatttttgctaatatagaaatatctacctctgccattaacagcaatgctagtgatctgtttgtatctaataacattttagcaaaaccatattccactattaaataacttattgtggctgaactttcaaaaacaatttttcgaattatatttgtgcttatgttgtaaggtatgctgccaaatattttatatggattgtggctaggaaatgtaaatttcagtatatcatcatttactatttgatagttaggataatttaagagcttattacgagttacctcacataatttagaatcaatttctatcgccgttacaaaattacatctctttaccaatccagcagtaaaatgacctttccctgcacctatttcaaagatgttatctttttcatctaaacttatgcaattcattattttttctatgtgatattttgaagtaataaaattttgactatcttttatatttactttgttcattataacctctccttaatttattgcatctcttttcgaatatttatgttttttgagaaaagaacgtactcatggttcatcccgatatgcgtatcggtctgtatatcagcaactttctatgtgtttcaactacaatagtcatctattctcatctttctgagtccaccccctgcaaagcccctctttacgacataaaaattcggtcggaaaaggtatgcaaaagatgtttctctctttaagagaaactcttcgggatgcaaaaatatgaaaataactccaattcaccaaattatatagcgacttttttacaaaatgctaaaatttgttgatttccgtcaagcaattgttgagcaaaaatgtcttttacgataaaatgatacctcaatatcaactgtttagcaaaacgatatttctcttaaagagagaaacacctttttgttcaccaatccccgacttttaatcccgcggccatgattgaaaaaggaagagtatgagtattcaacatttccgtgtcgcccttattcccttttttgcggcattttgccttcctgtttttgctcacccagaaacgctggtgaaagtaaaagatgctgaagatcagttgggtgcacgagtgggttacatcgaactggatctcaacagcggtaagatccttgagagttttcgccccgaagaacgttttccaatgatgagcacttttaaagttctgctatgtggcgcggtattatcccgtattgacgccgggcaagagcaactcggtcgccgcatacactattctcagaatgacttggttgagtactcaccagtcacagaaaagcatcttacggatggcatgacagtaagagaattatgcagtgctgccataaccatgagtgataacactgcggccaacttacttctgacaacgatcggaggaccgaaggagctaaccgcttttttgcacaacatgggggatcatgtaactcgccttgatcgttgggaaccggagctgaatgaagccataccaaacgacgagcgtgacaccacgatgcctgtagcaatggcaacaacgttgcgcaaactattaactggcgaactacttactctagcttcccggcaacaattaatagactggatggaggcggataaagttgcaggaccacttctgcgctcggcccttccggctggctggtttattgctgataaatctggagccggtgagcgtgggtctcgcggtatcattgcagcactggggccagatggtaagccctcccgtatcgtagttatctacacgacggggagtcaggcaactatggatgaacgaaatagacagatcgctgagataggtgcctcactgattaagcattggtaactgtcagaccaagtttactcataacgcgtcaattcgagggggatcaattccgtgataggtgggctgcccttcctggttggcttggtttcatcagccatccgcttgccctcatctgttacgccggcggtagccggccagcctcgcagagcaggattcccgttgagcaccgccaggtgcgaataagggacagtgaagaaggaacacccgctcgcgggtgggcctacttcacctatcctgcccggctgacgccgttggatacaccaaggaaagtctacacgaaccctttggcaaaatcctgtatatcgtgcgaaaaaggatggatataccgaaaaaatcgctataatgaccccgaagcagggttatgcagcggaaaacggaattgatccggccacgatgcgtccggcgtagaggatctgaagatcagcagttcaacctgttgatagtacgtactaagctctcatgtttcacgtactaagctctcatgtttaacgtactaagctctcatgtttaacgaactaaaccctcatggctaacgtactaagctctcatggctaacgtactaagctctcatgtttcacgtactaagctctcatgtttgaacaataaaattaatataaatcagcaacttaaatagcctctaaggttttaagttttataagaaaaaaaagaatatataaggcttttaaagcttttaag

SEQ ID NO: 52 - DNA, 8543 bp, synthetic construct
  misc_feature 1..8543: note = Description of sequence: Pbh202
  source 1..8543: mol_type = other DNA
gtttaacggttgtggacaacaagccagggatgtaacgcactgagaagcccttagagcctctcaaagcaattttgagtgacacaggaacacttaacggctgacatgggaattcccctccaccgcggtggtacaaagaaaattcgacaaactgttatttttctatctatttatttgaattttaagcgcttaaaatttacctttgtcggcaattttaagcgcttaaaattaaataaagatattctcgtcaaacaaatataaataatataaacatggtttttactctggaagattttgttggcgattggcgtcagaccgcgggttataatttggatcaagtcctggaacagggtggcgtaagctctctgttccagaacctgggtgtgagcgtgacgccgattcagcgcatcgttctgtccggcgagaacggtctgaaaattgatattcatgtgatcatcccgtacgaaggcctgagcggtgaccaaatgggtcaaatcgagaaaatctttaaagtcgtctacccagttgacgatcaccacttcaaggttatcttgcattacggtacgctggtgattgatggtgtgaccccgaatatgattgactatttcggccgtccgtatgaaggcattgccgtttttgacggtaaaaagatcaccgtcaccggtaccctgtggaatggcaataagattattgacgagcgtctgattaacccggacggcagcctgctgttccgcgtgaccatcaacggtgtcacgggttggcgtctgtgcgagcgcatcctggcataatgaactgcacttgctttgataattaatgataaacaatctaaaagcactctaatcgttatcggagtgcttttagattactaatcaaattgcttctactaattgcctatcttccagtgatggaacagcatttgtgcattggctgcaacaatcagccttgatctggaagaagcaatgaaagctgctgttaagtctccgaatcaggtattgttcctgacaggtgtattcccatccggtaaacgcggatactttgcagttgatctgactcaggaataaattataaattaaggtaagaagattgtaggataagctaatgaaatagaaaaaggatgccgtcacacaacttgtcggcattcttttttgttttattagttgaaaatatagtgaaaaagttgcctaaatatgtatgttaacaaattatttgtcgtaactttgcactccaaatctgtttttaacatatggcactagtgaaaccagtaacgttatacgatgtcgcagagtatgccggtgtctctaccgcgaccgtttccaacgtggtgaaccaggccagccacgtttctgcgaaaacgcgggaaaaagtggaagcggcgatggcggagctgaattacattcccaaccgcgtggcacaacaactggcgggcaaacagtcgttgctgattggcgttgccacctccagtctggccctgcacgcgccgtcgcaaattgtcgcggcgattaaatctcgcgccgatcaactgggtgccagcgtggtggtgtcgatggtagaacgaagcggcgtcgaagcctgtaaaacggcggtgcacaatcttctcgcgcaacgcgtcagtgggctgatcattaactatccgctggatgaccaggatgccattgctgtggaagctgcctgcactaatgttccggcgttatttcttgatgtctctgaccagacacccatcaacagtattattttctcccatgaagacggtacgcgactgggcgtggagcatctggtcgcattgggtcaccagcaaatcgcgctgttagcgggcccattaagttctgtctcggcgcgtctgcgtctggctggctggcataaatatctcactcgcaatcaaattcagccgatagcggaacgggaaggcgactggagtgccatgtccggttttcaacaaaccatgcaaatgctgaatgagggcatcgttcccactgcgatgctggttgccaacgatcagatggcgctgggcgcaatgcgcgccattaccgagtccgggctgcgcgttggtgcggatatctcggtagtgggatacgacgataccgaagacagctcatgttatatcccgccgttaaccaccatcaaacaggattttcgcctgctggggcaaaccagcgtggaccgcttgctgcaactctctcagggccaggcggtgaagggcaatcagctgttgcccgtctcactggtgaaaagaaaaaccaccctggcgcccaatacgcaaaccgcctctccccgcgcgttggccgattcattaatgcagctggcacgacaggtttcccgactggaaagcgggcagtgagctttcctcggtaccaaattccagaaaagaggcctcccgaaaggggggccttttttcgttttggtcctacttgtgcctgttctatttccgaaccgaccgcttgtatgaatccatcaaaattcgttttctctatgttggattccttgtttgatctggaagaagcaatgaaagctgctgttaagtctccgaatcaggtattgttcctgacaggtgtattcccatccggtaaacgcggatactttgcagttgatctgactcaggaataaattataaattaaggtaagaagattgtaggataagctaatgaaatagaaaaaggatgccgtcacacaacttgtcggcattcttttttgttttattagttgaaaatatagtgaaaaagttgcctaaatatgtatgttaacaaattatttgtcgtaactttgcactccaaatctgtttttaacatatggcactagtgaaaccagtaacgttatacgatgtcgcagagtatgccggtgtctctaccgcgaccgtttccaacgtggtgaaccaggccagccacgtttctgcgaaaacgcgggaaaaagtggaagcggcgatggcggagctcaattacattcccaaccgcgtggcacaacaactggcgggcaaagcgtcgcataccattggcatgttgatcactgccagtaccaatcctttctattcagaactggtgcgtggcgttgaacgcagctgcttcgaacgcggttatagtctcgtcctttgcaataccgaaggcgatgaacagcggatgaatcgcaatctggaaacgctgatgcaaaaacgcgttgatggcttgctgttactgtgcaccgaaacgcatcaaccttcgcgtgaaatcatgcaacgttatccgacagtgcctactgtgatgatggactgggctccgttcgatggcgacagcgatcttattcaggataactcgttgctgggcggagacttagcaacgcaatatctgatcgataaaggtcatacccgtatcgcctgtattaccggcccgctggataaaactccggcgcgcctgcggttggaaggttatcgggcggcgatgaaacgtgcgggtctcaacattcctgatggctatgaagtcactggtgattttgaatttaacggcgggtttgacgctatgcgccaactgctatcacatccgctgcgtcctcaggccgtctttaccggaaatgacgctatggctgttggcgtttaccaggcgttatatcaggcagagttacaggttccgcaggatatcgcggtgattggctatgacgatatcgaactggcaagctttatgacgccaccattaaccactatccaccaaccgaaagatgaactgggggagctggcgattgatgtactcatccatcggataacccagccgacccttcagcaacaacgattacaacttactccgattctgatggaacgcggttcggcttagctggtgaaaagaaaaaccaccctggcgcccaatacgcaaaccgcctctccccgcgcgttggccgattcattaatgcagctggcacgacaggtttcccgactggaaagcgggcagtgagctttcctcggtaccaaattccagaaaagaggcctcccgaaaggggggccttttttcgttttggtccgctcatattgtgatgataatttctacaaatatagtcattggtaactatctatgaaactgtttgatacttttatagttgattaaacttgttcatggcatttgccttaatatcatccgctatgtcaatgtagggtttcatagctttgtagtcgctgtgtcccgtccatttcatgaccacctgtgccgggattccgagagccagcgcattgcagatgaatgtccttcttcctgcatgggtactgagcaaagcgtatttgggtgtgacttcatcaatacgttcatttcccttgtagtaggtttcccgtacaggctcgttgatttctgccagttcgcccagctctttcaggtaatcgttcatcttctggttgctgatgacgggcagagccatgtaattctcgaaatggatgtccttgtatttgtccagtatggctttgctgtatttgttcagttcaatcgtcaggctgtcggcagtcttgactgtggttatttcgatgtggtcggacttcacatcgcttcttttcagattgcgaacatccgaataccgcaaactcgtaaagcagcagaacaggaaaacatcacgcacacgttccaggtattgcttatccttgggtatctggtagtctttcagcttgttcagttcatcccaagtcaggaagattacttttttcgaggtggttttcagtttcggtttgaacgtatcgtatgcaatgttctgatgatgtcctttcttgaagctccagcgcaggaaccatttgaggaatcccatttgcttgccgatggtgctgtttctcatatccttggtgtcacgcaggaagttgacgtattcgttcaatccaaactcgttgaaatagttgaacgttgcatcctccttgaactctttgaggtggttcctcactgctgcaaatttttcataggtggatgccgtccagttattctggttaccgcactcttttacaaactcatcgaacacctcccaaaagctgacaggggcttcttccggctgttcttcgctggtgtctttcattctcatgttgaaagcttccttcaactgttgggtcgttggcatgacctcctgcacctcaaattccttgaaaatattctggatttcggcatagtatttcagcaagtccgtattgatttcggctgcactttgctttagcttgttggtacatccgctctttacccgctgcttatctgcatcccatttggctacgtcaatccggtagcccgttgtaaactcgatgcgttggctggcaaagatgacacgcatacggatgggtacgttctctacgattggcacaccgttctttttccggctctccaatgcaaaaatgatgttgcgcttgatattcataattgggtgcgtttgaaattctacacccaaatatacacccaattattgagatagcaaaagacatttagaaacatttacttttactctatattgtaatttacacttgattatcagtcgtttgcagtcttatgatattctgtgaaagtataagttcgagagcctgtctctccgcaaaaaacgctgaaaatcagcagattgcaaaacaaacaccctgttttacacccaagaatgtaaagtcggctgtttttgttttatttaagataatacaaccactacataataaaagagtagcgatattaaaagaatccgatgagaaaagactaatatttatctatccattcagtttgatttttcaggactttacatcgtcctgaaagtatttgttggtaccggtaccgaggacgcgtaaacatttacagttgcatgtggcctattgtttttagccgttaaatattttataactattaaatagcgatacaaattgttcgaaactaatattgtttatatcatatattctcgcatgttttaaagctttattaaattgattttttgtaaacagtttttcgtactctttgttaacccatttcattacaaaagtttcatatttttttctctctttaaatgccatttttgctggctttctttttaatacaattaatgtgctatccactttaggttttggatggaaataatacctaggaatttttgctaatatagaaatatctacctctgccattaacagcaatgctagtgatctgtttgtatctaataacattttagcaaaaccatattccactattaaataacttattgtggctgaactttcaaaaacaatttttcgaattatatttgtgcttatgttgtaaggtatgctgccaaatattttatatggattgtggctaggaaatgtaaatttcagtatatcatcatttactatttgatagttaggataatttaagagcttattacgagttacctcacataatttagaatcaatttctatcgccgttacaaaattacatctctttaccaatccagcagtaaaatgacctttccctgcacctatttcaaagatgttatctttttcatctaaacttatgcaattcattattttttctatgtgatattttgaagtaataaaattttgactatcttttatatttactttgttcattataacctctccttaatttattgcatctcttttcgaatatttatgttttttgagaaaagaacgtactcatggttcatcccgatatgcgtatcggtctgtatatcagcaactttctatgtgtttcaactacaatagtcatctattctcatctttctgagtccaccccctgcaaagcccctctttacgacataaaaattcggtcggaaaaggtatgcaaaagatgtttctctctttaagagaaactcttcgggatgcaaaaatatgaaaataactccaattcaccaaattatatagcgacttttttacaaaatgctaaaatttgttgatttccgtcaagcaattgttgagcaaaaatgtcttttacgataaaatgatacctcaatatcaactgtttagcaaaacgatatttctcttaaagagagaaacacctttttgttcaccaatccccgacttttaatcccgcggccatgattgaaaaaggaagagtatgagtattcaacatttccgtgtcgcccttattcccttttttgcggcattttgccttcctgtttttgctcacccagaaacgctggtgaaagtaaaagatgctgaagatcagttgggtgcacgagtgggttacatcgaactggatctcaacagcggtaagatccttgagagttttcgccccgaagaacgttttccaatgatgagcacttttaaagttctgctatgtggcgcggtattatcccgtattgacgccgggcaagagcaactcggtcgccgcatacactattctcagaatgacttggttgagtactcaccagtcacagaaaagcatcttacggatggcatgacagtaagagaattatgcagtgctgccataaccatgagtgataacactgcggccaacttacttctgacaacgatcggaggaccgaaggagctaaccgcttttttgcacaacatgggggatcatgtaactcgccttgatcgttgggaaccggagctgaatgaagccataccaaacgacgagcgtgacaccacgatgcctgtagcaatggcaacaacgttgcgcaaactattaactggcgaactacttactctagcttcccggcaacaattaatagactggatggaggcggataaagttgcaggaccacttctgcgctcggcccttccggctggctggtttattgctgataaatctggagccggtgagcgtgggtctcgcggtatcattgcagcactggggccagatggtaagccctcccgtatcgtagttatctacacgacggggagtcaggcaactatggatgaacgaaatagacagatcgctgagataggtgcctcactgattaagcattggtaactgtcagaccaagtttactcataacgcgtcaattcgagggggatcaattccgtgataggtgggctgcccttcctggttggcttggtttcatcagccatccgcttgccctcatctgttacgccggcggtagccggccagcctcgcagagcaggattcccgttgagcaccgccaggtgcgaataagggacagtgaagaaggaacacccgctcgcgggtgggcctacttcacctatcctgcccggctgacgccgttggatacaccaaggaaagtctacacgaaccctttggcaaaatcctgtatatcgtgcgaaaaaggatggatataccgaaaaaatcgctataatgaccccgaagcagggttatgcagcggaaaacggaattgatccggccacgatgcgtccggcgtagaggatctgaagatcagcagttcaacctgttgatagtacgtactaagctctcatgtttcacgtactaagctctcatgtttaacgtactaagctctcatgtttaacgaactaaaccctcatggctaacgtactaagctctcatggctaacgtactaagctctcatgtttcacgtactaagctctcatgtttgaacaataaaattaatataaatcagcaacttaaatagcctctaaggttttaagttttataagaaaaaaaagaatatataaggcttttaaagcttttaag

SEQ ID NO: 53 - DNA, 8543 bp, synthetic construct
  misc_feature 1..8543: note = Description of sequence: pBH203
  source 1..8543: mol_type = other DNA
gtttaacggttgtggacaacaagccagggatgtaacgcactgagaagcccttagagcctctcaaagcaattttgagtgacacaggaacacttaacggctgacatgggaattcccctccaccgcggtggtacaaagaaaattcgacaaactgttatttttctatctatttatttgaattaggagcgctcctaatttacctttgtcggcaattaggagcgctcctaattaaataaagatattctcgtcaaacaaatataaataatataaacatggtttttactctggaagattttgttggcgattggcgtcagaccgcgggttataatttggatcaagtcctggaacagggtggcgtaagctctctgttccagaacctgggtgtgagcgtgacgccgattcagcgcatcgttctgtccggcgagaacggtctgaaaattgatattcatgtgatcatcccgtacgaaggcctgagcggtgaccaaatgggtcaaatcgagaaaatctttaaagtcgtctacccagttgacgatcaccacttcaaggttatcttgcattacggtacgctggtgattgatggtgtgaccccgaatatgattgactatttcggccgtccgtatgaaggcattgccgtttttgacggtaaaaagatcaccgtcaccggtaccctgtggaatggcaataagattattgacgagcgtctgattaacccggacggcagcctgctgttccgcgtgaccatcaacggtgtcacgggttggcgtctgtgcgagcgcatcctggcataatgaactgcacttgctttgataattaatgataaacaatctaaaagcactctaatcgttatcggagtgcttttagattactaatcaaattgcttctactaattgcctatcttccagtgatggaacagcatttgtgcattggctgcaacaatcagccttgatctggaagaagcaatgaaagctgctgttaagtctccgaatcaggtattgttcctgacaggtgtattcccatccggtaaacgcggatactttgcagttgatctgactcaggaataaattataaattaaggtaagaagattgtaggataagctaatgaaatagaaaaaggatgccgtcacacaacttgtcggcattcttttttgttttattagttgaaaatatagtgaaaaagttgcctaaatatgtatgttaacaaattatttgtcgtaactttgcactccaaatctgtttttaacatatggcactagtgaaaccagtaacgttatacgatgtcgcagagtatgccggtgtctctaaaagcaccgtttccctggtggtgaaccaggccagccacgtttctgcgaaaacgcgggaaaaagtggaagcggcgatggcggagctgaattacattcccaaccgcgtggcacaacaactggcgggcaaacagtcgttgctgattggcgttgccacctccagtctggccctgcacgcgccgtcgcaaattgtcgcggcgattaaatctcgcgccgatcaactgggtgccagcgtggtggtgtcgatggtagaacgaagcggcgtcgaagcctgtaaaacggcggtgcacaatcttctcgcgcaacgcgtcagtgggctgatcattaactatccgctggatgaccaggatgccattgctgtggaagctgcctgcactaatgttccggcgttatttcttgatgtctctgaccagacacccatcaacagtattattttctcccatgaagacggtacgcgactgggcgtggagcatctggtcgcattgggtcaccagcaaatcgcgctgttagcgggcccattaagttctgtctcggcgcgtctgcgtctggctggctggcataaatatctcactcgcaatcaaattcagccgatagcggaacgggaaggcgactggagtgccatgtccggttttcaacaaaccatgcaaatgctgaatgagggcatcgttcccactgcgatgctggttgccaacgatcagatggcgctgggcgcaatgcgcgccattaccgagtccgggctgcgcgttggtgcggatatctcggtagtgggatacgacgataccgaagacagctcatgttatatcccgccgttaaccaccatcaaacaggattttcgcctgctggggcaaaccagcgtggaccgcttgctgcaactctctcagggccaggcggtgaagggcaatcagctgttgcccgtctcactggtgaaaagaaaaaccaccctggcgcccaatacgcaaaccgcctctccccgcgcgttggccgattcattaatgcagctggcacgacaggtttcccgactggaaagcgggcagtgagctttcctcggtaccaaattccagaaaagaggcctcccgaaaggggggccttttttcgttttggtcctacttgtgcctgttctatttccgaaccgaccgcttgtatgaatccatcaaaattcgttttctctatgttggattccttgtttgatctggaagaagcaatgaaagctgctgttaagtctccgaatcaggtattgttcctgacaggtgtattcccatccggtaaacgcggatactttgcagttgatctgactcaggaataaattataaattaaggtaagaagattgtaggataagctaatgaaatagaaaaaggatgccgtcacacaacttgtcggcattcttttttgttttattagttgaaaatatagtgaaaaagttgcctaaatatgtatgttaacaaattatttgtcgtaactttgcactccaaatctgtttttaacatatggcactagtgaaaccagtaacgttatacgatgtcgcagagtatgccggtgtctctaaaagcaccgtttccctggtggtgaaccaggccagccacgtttctgcgaaaacgcgggaaaaagtggaagcggcgatggcggagctcaattacattcccaaccgcgtggcacaacaactggcgggcaaagcgtcgcataccattggcatgttgatcactgccagtaccaatcctttctattcagaactggtgcgtggcgttgaacgcagctgcttcgaacgcggttatagtctcgtcctttgcaataccgaaggcgatgaacagcggatgaatcgcaatctggaaacgctgatgcaaaaacgcgttgatggcttgctgttactgtgcaccgaaacgcatcaaccttcgcgtgaaatcatgcaacgttatccgacagtgcctactgtgatgatggactgggctccgttcgatggcgacagcgatcttattcaggataactcgttgctgggcggagacttagcaacgcaatatctgatcgataaaggtcatacccgtatcgcctgtattaccggcccgctggataaaactccggcgcgcctgcggttggaaggttatcgggcggcgatgaaacgtgcgggtctcaacattcctgatggctatgaagtcactggtgattttgaatttaacggcgggtttgacgctatgcgccaactgctatcacatccgctgcgtcctcaggccgtctttaccggaaatgacgctatggctgttggcgtttaccaggcgttatatcaggcagagttacaggttccgcaggatatcgcggtgattggctatgacgatatcgaactggcaagctttatgacgccaccattaaccactatccaccaaccgaaagatgaactgggggagctggcgattgatgtactcatccatcggataacccagccgacccttcagcaacaacgattacaacttactccgattctgatggaacgcggttcggcttagctggtgaaaagaaaaaccaccctggcgcccaatacgcaaaccgcctctccccgcgcgttggccgattcattaatgcagctggcacgacaggtttcccgactggaaagcgggcagtgagctttcctcggtaccaaattccagaaaagaggcctcccgaaaggggggccttttttcgttttggtccgctcatattgtgatgataatttctacaaatatagtcattggtaactatctatgaaactgtttgatacttttatagttgattaaacttgttcatggcatttgccttaatatcatccgctatgtcaatgtagggtttcatagctttgtagtcgctgtgtcccgtccatttcatgaccacctgtgccgggattccgagagccagcgcattgcagatgaatgtccttcttcctgcatgggtactgagcaaagcgtatttgggtgtgacttcatcaatacgttcatttcccttgtagtaggtttcccgtacaggctcgttgatttctgccagttcgcccagctctttcaggtaatcgttcatcttctggttgctgatgacgggcagagccatgtaattctcgaaatggatgtccttgtatttgtccagtatggctttgctgtatttgttcagttcaatcgtcaggctgtcggcagtcttgactgtggttatttcgatgtggtcggacttcacatcgcttcttttcagattgcgaacatccgaataccgcaaactcgtaaagcagcagaacaggaaaacatcacgcacacgttccaggtattgcttatccttgggtatctggtagtctttcagcttgttcagttcatcccaagtcaggaagattacttttttcgaggtggttttcagtttcggtttgaacgtatcgtatgcaatgttctgatgatgtcctttcttgaagctccagcgcaggaaccatttgaggaatcccatttgcttgccgatggtgctgtttctcatatccttggtgtcacgcaggaagttgacgtattcgttcaatccaaactcgttgaaatagttgaacgttgcatcctccttgaactctttgaggtggttcctcactgctgcaaatttttcataggtggatgccgtccagttattctggttaccgcactcttttacaaactcatcgaacacctcccaaaagctgacaggggcttcttccggctgttcttcgctggtgtctttcattctcatgttgaaagcttccttcaactgttgggtcgttggcatgacctcctgcacctcaaattccttgaaaatattctggatttcggcatagtatttcagcaagtccgtattgatttcggctgcactttgctttagcttgttggtacatccgctctttacccgctgcttatctgcatcccatttggctacgtcaatccggtagcccgttgtaaactcgatgcgttggctggcaaagatgacacgcatacggatgggtacgttctctacgattggcacaccgttctttttccggctctccaatgcaaaaatgatgttgcgcttgatattcataattgggtgcgtttgaaattctacacccaaatatacacccaattattgagatagcaaaagacatttagaaacatttacttttactctatattgtaatttacacttgattatcagtcgtttgcagtcttatgatattctgtgaaagtataagttcgagagcctgtctctccgcaaaaaacgctgaaaatcagcagattgcaaaacaaacaccctgttttacacccaagaatgtaaagtcggctgtttttgttttatttaagataatacaaccactacataataaaagagtagcgatattaaaagaatccgatgagaaaagactaatatttatctatccattcagtttgatttttcaggactttacatcgtcctgaaagtatttgttggtaccggtaccgaggacgcgtaaacatttacagttgcatgtggcctattgtttttagccgttaaatattttataactattaaatagcgatacaaattgttcgaaactaatattgtttatatcatatattctcgcatgttttaaagctttattaaattgattttttgtaaacagtttttcgtactctttgttaacccatttcattacaaaagtttcatatttttttctctctttaaatgccatttttgctggctttctttttaatacaattaatgtgctatccactttaggttttggatggaaataatacctaggaatttttgctaatatagaaatatctacctctgccattaacagcaatgctagtgatctgtttgtatctaataacattttagcaaaaccatattccactattaaataacttattgtggctgaactttcaaaaacaatttttcgaattatatttgtgcttatgttgtaaggtatgctgccaaatattttatatggattgtggctaggaaatgtaaatttcagtatatcatcatttactatttgatagttaggataatttaagagcttattacgagttacctcacataatttagaatcaatttctatcgccgttacaaaattacatctctttaccaatccagcagtaaaatgacctttccctgcacctatttcaaagatgttatctttttcatctaaacttatgcaattcattattttttctatgtgatattttgaagtaataaaattttgactatcttttatatttactttgttcattataacctctccttaatttattgcatctcttttcgaatatttatgttttttgagaaaagaacgtactcatggttcatcccgatatgcgtatcggtctgtatatcagcaactttctatgtgtttcaactacaatagtcatctattctcatctttctgagtccaccccctgcaaagcccctctttacgacataaaaattcggtcggaaaaggtatgcaaaagatgtttctctctttaagagaaactcttcgggatgcaaaaatatgaaaataactccaattcaccaaattatatagcgacttttttacaaaatgctaaaatttgttgatttccgtcaagcaattgttgagcaaaaatgtcttttacgataaaatgatacctcaatatcaactgtttagcaaaacgatatttctcttaaagagagaaacacctttttgttcaccaatccccgacttttaatcccgcggccatgattgaaaaaggaagagtatgagtattcaacatttccgtgtcgcccttattcccttttttgcggcattttgccttcctgtttttgctcacccagaaacgctggtgaaagtaaaagatgctgaagatcagttgggtgcacgagtgggttacatcgaactggatctcaacagcggtaagatccttgagagttttcgccccgaagaacgttttccaatgatgagcacttttaaagttctgctatgtggcgcggtattatcccgtattgacgccgggcaagagcaactcggtcgccgcatacactattctcagaatgacttggttgagtactcaccagtcacagaaaagcatcttacggatggcatgacagtaagagaattatgcagtgctgccataaccatgagtgataacactgcggccaacttacttctgacaacgatcggaggaccgaaggagctaaccgcttttttgcacaacatgggggatcatgtaactcgccttgatcgttgggaaccggagctgaatgaagccataccaaacgacgagcgtgacaccacgatgcctgtagcaatggcaacaacgttgcgcaaactattaactggcgaactacttactctagcttcccggcaacaattaatagactggatggaggcggataaagttgcaggaccacttctgcgctcggcccttccggctggctggtttattgctgataaatctggagccggtgagcgtgggtctcgcggtatcattgcagcactggggccagatggtaagccctcccgtatcgtagttatctacacgacggggagtcaggcaactatggatgaacgaaatagacagatcgctgagataggtgcctcactgattaagcattggtaactgtcagaccaagtttactcataacgcgtcaattcgagggggatcaattccgtgataggtgggctgcccttcctggttggcttggtttcatcagccatccgcttgccctcatctgttacgccggcggtagccggccagcctcgcagagcaggattcccgttgagcaccgccaggtgcgaataagggacagtgaagaaggaacacccgctcgcgggtgggcctacttcacctatcctgcccggctgacgccgttggatacaccaaggaaagtctacacgaaccctttggcaaaatcctgtatatcgtgcgaaaaaggatggatataccgaaaaaatcgctataatgaccccgaagcagggttatgcagcggaaaacggaattgatccggccacgatgcgtccggcgtagaggatctgaagatcagcagttcaacctgttgatagtacgtactaagctctcatgtttcacgtactaagctctcatgtttaacgtactaagctctcatgtttaacgaactaaaccctcatggctaacgtactaagctctcatggctaacgtactaagctctcatgtttcacgtactaagctctcatgtttgaacaataaaattaatataaatcagcaacttaaatagcctctaaggttttaagttttataagaaaaaaaagaatatataaggcttttaaagcttttaag

SEQ ID NO: 54 - DNA, 8544 bp, synthetic construct
  misc_feature 1..8544: note = Description of sequence: pBH204
  source 1..8544: mol_type = other DNA
gtttaacggttgtggacaacaagccagggatgtaacgcactgagaagcccttagagcctctcaaagcaattttgagtgacacaggaacacttaacggctgacatgggaattcccctccaccgcggtggtacaaagaaaattcgacaaactgttatttttctatctatttatttgaattgtgagcggataacaattacctttgtcggcaattgtgagcggataacaattaaataaagatattctcgtcaaacaaatataaataatataaacatggtttttactctggaagattttgttggcgattggcgtcagaccgcgggttataatttggatcaagtcctggaacagggtggcgtaagctctctgttccagaacctgggtgtgagcgtgacgccgattcagcgcatcgttctgtccggcgagaacggtctgaaaattgatattcatgtgatcatcccgtacgaaggcctgagcggtgaccaaatgggtcaaatcgagaaaatctttaaagtcgtctacccagttgacgatcaccacttcaaggttatcttgcattacggtacgctggtgattgatggtgtgaccccgaatatgattgactatttcggccgtccgtatgaaggcattgccgtttttgacggtaaaaagatcaccgtcaccggtaccctgtggaatggcaataagattattgacgagcgtctgattaacccggacggcagcctgctgttccgcgtgaccatcaacggtgtcacgggttggcgtctgtgcgagcgcatcctggcataatgaactgcacttgctttgataattaatgataaacaatctaaaagcactctaatcgttatcggagtgcttttagattactaatcaaattgcttctactaattgcctatcttccagtgatggaacagcatttgtgcattggctgcaacaatcagccttgatctggaagaagcaatgaaagctgctgttaagtctccgaatcaggtattgttcctgacaggtgtattcccatccggtaaacgcggatactttgcagttgatctgactcaggaataaattataaattaaggtaagaagattgtaggataagctaatgaaatagaaaaaggatgccgtcacacaacttgtcggcattcttttttgttttattagttgaaaatatagtgaaaaagttgcctaaatatgtatgttaacaaattatttgtcgtaactttgcactccaaatctgtttttaacatatggcactagtgaaaccagtaacgttatacgatgtcgcagagtatgccggtgtctcttatcagaccgtttcccgcgtggtgaaccaggccagccacgtttctgcgaaaacgcgggaaaaagtggaagcggcgatggcggagctgaattacattcccaaccgcgtggcacaacaactggcgggcaaacagtcgttgctgattggcgttgccacctccagtctggccctgcacgcgctgtcgcaaattgtcgcggcgattaaatctcgcgcctatcaactgggtgccagcgtgttcgtgtcgatggtagaacgaagcggcatcgaagcctgtaaaacggcggtgcacaatcttctcgcgcaacgcgtcagtgggctgatcattaactatccgctggataaccaggatgccattgctgtggaagctgcctgcactaatgttccggcgttatttcttgatgtctctgaccagacacccatcaacagtattattttctcccatgaagacggtacgcgactgggcgtggagcatctggtcgcattgggtcaccagcaaatcgcgctgttagcgggcccattaagttctgtctcggcgcgtctgcgtctggctggctggcataaatatctcactcgcaatcaaattcagccgatagcggaacgggaaggcgactggagtgccatgtccggttttcaacaaaccatgcaaatgctgaatgagggcatcgttcccactgcgatgctggttgccaacgatcagatggcgctgggcgcaatgcgcgccattaccgagaccgggctgcgcgttggtgcggatatctcggtagtgggatacgacgataccgaagacagctcatgttatatcccgccgttaaccaccatcaaacaggattttcgcctgctggggcaaaccagcgtggaccgcttgctgcaactctctcagggccaggcggtgaagggcaatcagctgttgcccgtctcactggtgaaaagaaaaaccaccctggcgcccaatacgcaaaccgcctctccccgcgcgttggccgattcattaatgcagctggcacgacaggtttcccgactggaaagcgggcagtgagctttcctcggtaccaaattccagaaaagaggcctcccgaaaggggggccttttttcgttttggtcctacttgtgcctgttctatttccgaaccgaccgcttgtatgaatccatcaaaattcgttttctctatgttggattccttgtttgatctggaagaagcaatgaaagctgctgttaagtctccgaatcaggtattgttcctgacaggtgtattcccatccggtaaacgcggatactttgcagttgatctgactcaggaataaattataaattaaggtaagaagattgtaggataagctaatgaaatagaaaaaggatgccgtcacacaacttgtcggcattcttttttgttttattagttgaaaatatagtgaaaaagttgcctaaatatgtatgttaacaaattatttgtcgtaactttgcactccaaatctgtttttaacatatggcactagtgaaaccagtaacgttatacgatgtcgcagagtatgccggtgtctcttatcagaccgtttcccgcgtggtgaaccaggccagccacgtttctgcgaaaacgcgggaaaaagtggaagcggcgatggcggagctcaattacattcccaaccgcgtggcacaacaactggcgggcaaagcgtcgcataccattggcatgttgatcactgccagtaccaatcctttctattcagaactggtgcgtggcgttgaacgcagctgcttcgaacgcggttatagtctcgatctttgcaataccgaaggcgatgaacagcggatgaatcgcaatctggaaacgctgatgcaaaaacgcgttgatggcttgctgttactgtgcaccgaaacgcatcaaccttcgcgtgaaatcatgcaacgttatccgacagtgcctactgtgatgatggactgggctccgttcgatggcgacagcgatcttattcaggataactcgttgctgggcggagacttagcaacgcaatatctgatcgataaaggtcatacccgtatcgcctgtattaccggcccgctggataaaactccggcgcgcctgcggttggaaggttatcgggcggcgatgaaacgtgcgggtctcaacattcctgatggctatgaagtcactggtgattttgaatttaacggcgggtttgacgctatgcgccaactgctatcacatccgctgcgtcctcaggccgtctttaccggaaatgacgctatggctgttggcgtttaccaggcgttatatcaggcagagttacaggttccgcaggatatcgcggtgattggctatgacgatatcgaactggcaagctttatgacgccaccattaaccactatccaccaaccgaaagatgaactgggggagctggcgattgatgtactcatccatcggataacccagccgacccttcagcaacaacgattacaacttactccgattctgatggaacgcggttcggcttagctggtgaaaagaaaaaccaccctggcgcccaatacgcaaaccgcctctccccgcgcgttggccgattcattaatgcagctggcacgacaggtttcccgactggaaagcgggcagtgagctttcctcggtaccaaattccagaaaagaggcctcccgaaaggggggccttttttcgttttggtccgctcatattgtgatgataatttctacaaatatagtcattggtaactatctatgaaactgtttgatacttttatagttgattaaacttgttcatggcatttgccttaatatcatccgctatgtcaatgtagggtttcatagctttgtagtcgctgtgtcccgtccatttcatgaccacctgtgccgggattccgagagccagcgcattgcagatgaatgtccttcttcctgcatgggtactgagcaaagcgtatttgggtgtgacttcatcaatacgttcatttcccttgtagtaggtttcccgtacaggctcgttgatttctgccagttcgcccagctctttcaggtaatcgttcatcttctggttgctgatgacgggcagagccatgtaattctcgaaatggatgtccttgtatttgtccagtatggctttgctgtatttgttcagttcaatcgtcaggctgtcggcagtcttgactgtggttatttcgatgtggtcggacttcacatcgcttcttttcagattgcgaacatccgaataccgcaaactcgtaaagcagcagaacaggaaaacatcacgcacacgttccaggtattgcttatccttgggtatctggtagtctttcagcttgttcagttcatcccaagtcaggaagattacttttttcgaggtggttttcagtttcggtttgaacgtatcgtatgcaatgttctgatgatgtcctttcttgaagctccagcgcaggaaccatttgaggaatcccatttgcttgccgatggtgctgtttctcatatccttggtgtcacgcaggaagttgacgtattcgttcaatccaaactcgttgaaatagttgaacgttgcatcctccttgaactctttgaggtggttcctcactgctgcaaatttttcataggtggatgccgtccagttattctggttaccgcactcttttacaaactcatcgaacacctcccaaaagctgacaggggcttcttccggctgttcttcgctggtgtctttcattctcatgttgaaagcttccttcaactgttgggtcgttggcatgacctcctgcacctcaaattccttgaaaatattctggatttcggcatagtatttcagcaagtccgtattgatttcggctgcactttgctttagcttgttggtacatccgctctttacccgctgcttatctgcatcccatttggctacgtcaatccggtagcccgttgtaaactcgatgcgttggctggcaaagatgacacgcatacggatgggtacgttctctacgattggcacaccgttctttttccggctctccaatgcaaaaatgatgttgcgcttgatattcataattgggtgcgtttgaaattctacacccaaatatacacccaattattgagatagcaaaagacatttagaaacatttacttttactctatattgtaatttacacttgattatcagtcgtttgcagtcttatgatattctgtgaaagtataagttcgagagcctgtctctccgcaaaaaacgctgaaaatcagcagattgcaaaacaaacaccctgttttacacccaagaatgtaaagtcggctgtttttgttttatttaagataatacaaccactacataataaaagagtagcgatattaaaagaatccgatgagaaaagactaatatttatctatccattcagtttgatttttcaggactttacatcgtcctgaaagtatttgttggtaccggtaccgaggacgcgtaaacatttacagttgcatgtggcctattgtttttagccgttaaatattttataactattaaatagcgatacaaattgttcgaaactaatattgtttatatcatatattctcgcatgttttaaagctttattaaattgattttttgtaaacagtttttcgtactctttgttaacccatttcattacaaaagtttcatatttttttctctctttaaatgccatttttgctggctttctttttaatacaattaatgtgctatccactttaggttttggatggaaataatacctaggaatttttgctaatatagaaatatctacctctgccattaacagcaatgctagtgatctgtttgtatctaataacattttagcaaaaccatattccactattaaataacttattgtggctgaactttcaaaaacaatttttcgaattatatttgtgcttatgttgtaaggtatgctgccaaatattttatatggattgtggctaggaaatgtaaatttcagtatatcatcatttactatttgatagttaggataatttaagagcttattacgagttacctcacataatttagaatcaatttctatcgccgttacaaaattacatctctttaccaatccagcagtaaaatgacctttccctgcacctatttcaaagatgttatctttttcatctaaacttatgcaattcattattttttctatgtgatattttgaagtaataaaattttgactatcttttatatttactttgttcattataacctctccttaatttattgcatctcttttcgaatatttatgttttttgagaaaagaacgtactcatggttcatcccgatatgcgtatcggtctgtatatcagcaactttctatgtgtttcaactacaatagtcatctattctcatctttctgagtccaccccctgcaaagcccctctttacgacataaaaattcggtcggaaaaggtatgcaaaagatgtttctctctttaagagaaactcttcgggatgcaaaaatatgaaaataactccaattcaccaaattatatagcgacttttttacaaaatgctaaaatttgttgatttccgtcaagcaattgttgagcaaaaatgtcttttacgataaaatgatacctcaatatcaactgtttagcaaaacgatatttctcttaaagagagaaacacctttttgttcaccaatccccgacttttaatcccgcggccatgattgaaaaaggaagagtatgagtattcaacatttccgtgtcgcccttattcccttttttgcggcattttgccttcctgtttttgctcacccagaaacgctggtgaaagtaaaagatgctgaagatcagttgggtgcacgagtgggttacatcgaactggatctcaacagcggtaagatccttgagagttttcgccccgaagaacgttttccaatgatgagcacttttaaagttctgctatgtggcgcggtattatcccgtattgacgccgggcaagagcaactcggtcgccgcatacactattctcagaatgacttggttgagtactcaccagtcacagaaaagcatcttacggatggcatgacagtaagagaattatgcagtgctgccataaccatgagtgataacactgcggccaacttacttctgacaacgatcggaggaccgaaggagctaaccgcttttttgcacaacatgggggatcatgtaactcgccttgatcgttgggaaccggagctgaatgaagccataccaaacgacgagcgtgacaccacgatgcctgtagcaatggcaacaacgttgcgcaaactattaactggcgaactacttactctagcttcccggcaacaattaatagactggatggaggcggataaagttgcaggaccacttctgcgctcggcccttccggctggctggtttattgctgataaatctggagccggtgagcgtgggtctcgcggtatcattgcagcactggggccagatggtaagccctcccgtatcgtagttatctacacgacggggagtcaggcaactatggatgaacgaaatagacagatcgctgagataggtgcctcactgattaagcattggtaactgtcagaccaagtttactcataacgcgtcaattcgagggggatcaattccgtgataggtgggctgcccttcctggttggcttggtttcatcagccatccgcttgccctcatctgttacgccggcggtagccggccagcctcgcagagcaggattcccgttgagcaccgccaggtgcgaataagggacagtgaagaaggaacacccgctcgcgggtgggcctacttcacctatcctgcccggctgacgccgttggatacaccaaggaaagtctacacgaaccctttggcaaaatcctgtatatcgtgcgaaaaaggatggatataccgaaaaaatcgctataatgaccccgaagcagggttatgcagcggaaaacggaattgatccggccacgatgcgtccggcgtagaggatctgaagatcagcagttcaacctgttgatagtacgtactaagctctcatgtttcacgtactaagctctcatgtttaacgtactaagctctcatgtttaacgaactaaaccctcatggctaacgtactaagctctcatggctaacgtactaagctctcatgtttcacgtactaagctctcatgtttgaacaataaaattaatataaatcagcaacttaaatagcctctaaggttttaagttttataagaaaaaaaagaatatataaggcttttaaagcttttaag

SEQ ID NO: 55 - DNA, 8543 bp, synthetic construct
  misc_feature 1..8543: note = Description of sequence: pBH205
  source 1..8543: mol_type = other DNA
gtttaacggttgtggacaacaagccagggatgtaacgcactgagaagcccttagagcctctcaaagcaattttgagtgacacaggaacacttaacggctgacatgggaattcccctccaccgcggtggtacaaagaaaattcgacaaactgttatttttctatctatttatttgaattttaagcgcttaaaatttacctttgtcggcaattttaagcgcttaaaattaaataaagatattctcgtcaaacaaatataaataatataaacatggtttttactctggaagattttgttggcgattggcgtcagaccgcgggttataatttggatcaagtcctggaacagggtggcgtaagctctctgttccagaacctgggtgtgagcgtgacgccgattcagcgcatcgttctgtccggcgagaacggtctgaaaattgatattcatgtgatcatcccgtacgaaggcctgagcggtgaccaaatgggtcaaatcgagaaaatctttaaagtcgtctacccagttgacgatcaccacttcaaggttatcttgcattacggtacgctggtgattgatggtgtgaccccgaatatgattgactatttcggccgtccgtatgaaggcattgccgtttttgacggtaaaaagatcaccgtcaccggtaccctgtggaatggcaataagattattgacgagcgtctgattaacccggacggcagcctgctgttccgcgtgaccatcaacggtgtcacgggttggcgtctgtgcgagcgcatcctggcataatgaactgcacttgctttgataattaatgataaacaatctaaaagcactctaatcgttatcggagtgcttttagattactaatcaaattgcttctactaattgcctatcttccagtgatggaacagcatttgtgcattggctgcaacaatcagccttgatctggaagaagcaatgaaagctgctgttaagtctccgaatcaggtattgttcctgacaggtgtattcccatccggtaaacgcggatactttgcagttgatctgactcaggaataaattataaattaaggtaagaagattgtaggataagctaatgaaatagaaaaaggatgccgtcacacaacttgtcggcattcttttttgttttattagttgaaaatatagtgaaaaagttgcctaaatatgtatgttaacaaattatttgtcgtaactttgcactccaaatctgtttttaacatatggcactagtgaaaccagtaacgttatacgatgtcgcagagtatgccggtgtctctaccgcgaccgtttccaacgtggtgaaccaggccagccacgtttctgcgaaaacgcgggaaaaagtggaagcggcgatggcggagctgaattacattcccaaccgcgtggcacaacaactggcgggcaaacagtcgttgctgattggcgttgccacctccagtctggccctgcacgcgctgtcgcaaattgtcgcggcgattaaatctcgcgcctatcaactgggtgccagcgtgttcgtgtcgatggtagaacgaagcggcatcgaagcctgtaaaacggcggtgcacaatcttctcgcgcaacgcgtcagtgggctgatcattaactatccgctggataaccaggatgccattgctgtggaagctgcctgcactaatgttccggcgttatttcttgatgtctctgaccagacacccatcaacagtattattttctcccatgaagacggtacgcgactgggcgtggagcatctggtcgcattgggtcaccagcaaatcgcgctgttagcgggcccattaagttctgtctcggcgcgtctgcgtctggctggctggcataaatatctcactcgcaatcaaattcagccgatagcggaacgggaaggcgactggagtgccatgtccggttttcaacaaaccatgcaaatgctgaatgagggcatcgttcccactgcgatgctggttgccaacgatcagatggcgctgggcgcaatgcgcgccattaccgagaccgggctgcgcgttggtgcggatatctcggtagtgggatacgacgataccgaagacagctcatgttatatcccgccgttaaccaccatcaaacaggattttcgcctgctggggcaaaccagcgtggaccgcttgctgcaactctctcagggccaggcggtgaagggcaatcagctgttgcccgtctcactggtgaaaagaaaaaccaccctggcgcccaatacgcaaaccgcctctccccgcgcgttggccgattcattaatgcagctggcacgacaggtttcccgactggaaagcgggcagtgagctttcctcggtaccaaattccagaaaagaggcctcccgaaaggggggccttttttcgttttggtcctacttgtgcctgttctatttccgaaccgaccgcttgtatgaatccatcaaaattcgttttctctatgttggattccttgtttgatctggaagaagcaatgaaagctgctgttaagtctccgaatcaggtattgttcctgacaggtgtattcccatccggtaaacgcggatactttgcagttgatctgactcaggaataaattataaattaaggtaagaagattgtaggataagctaatgaaatagaaaaaggatgccgtcacacaacttgtcggcattcttttttgttttattagttgaaaatatagtgaaaaagttgcctaaatatgtatgttaacaaattatttgtcgtaactttgcactccaaatctgtttttaacatatggcactagtgaaaccagtaacgttatacgatgtcgcagagtatgccggtgtctctaccgcgaccgtttccaacgtggtgaaccaggccagccacgtttctgcgaaaacgcgggaaaaagtggaagcggcgatggcggagctcaattacattcccaaccgcgtggcacaacaactggcgggcaaagcgtcgcataccattggcatgttgatcactgccagtaccaatcctttctattcagaactggtgcgtggcgttgaacgcagctgcttcgaacgcggttatagtctcgatctttgcaataccgaaggcgatgaacagcggatgaatcgcaatctggaaacgctgatgcaaaaacgcgttgatggcttgctgttactgtgcaccgaaacgcatcaaccttcgcgtgaaatcatgcaacgttatccgacagtgcctactgtgatgatggactgggctccgttcgatggcgacagcgatcttattcaggataactcgttgctgggcggagacttagcaacgcaatatctgatcgataaaggtcatacccgtatcgcctgtattaccggcccgctggataaaactccggcgcgcctgcggttggaaggttatcgggcggcgatgaaacgtgcgggtctcaacattcctgatggctatgaagtcactggtgattttgaatttaacggcgggtttgacgctatgcgccaactgctatcacatccgctgcgtcctcaggccgtctttaccggaaatgacgctatggctgttggcgtttaccaggcgttatatcaggcagagttacaggttccgcaggatatcgcggtgattggctatgacgatatcgaactggcaagctttatgacgccaccattaaccactatccaccaaccgaaagatgaactgggggagctggcgattgatgtactcatccatcggataacccagccgacccttcagcaacaacgattacaacttactccgattctgatggaacgcggttcggcttagctggtgaaaagaaaaaccaccctggcgcccaatacgcaaaccgcctctccccgcgcgttggccgattcattaatgcagctggcacgacaggtttcccgactggaaagcgggcagtgagctttcctcggtaccaaattccagaaaagaggcctcccgaaaggggggccttttttcgttttggtccgctcatattgtgatgataatttctacaaatatagtcattggtaactatctatgaaactgtttgatacttttatagttgattaaacttgttcatggcatttgccttaatatcatccgctatgtcaatgtagggtttcatagctttgtagtcgctgtgtcccgtccatttcatgaccacctgtgccgggattccgagagccagcgcattgcagatgaatgtccttcttcctgcatgggtactgagcaaagcgtatttgggtgtgacttcatcaatacgttcatttcccttgtagtaggtttcccgtacaggctcgttgatttctgccagttcgcccagctctttcaggtaatcgttcatcttctggttgctgatgacgggcagagccatgtaattctcgaaatggatgtccttgtatttgtccagtatggctttgctgtatttgttcagttcaatcgtcaggctgtcggcagtcttgactgtggttatttcgatgtggtcggacttcacatcgcttcttttcagattgcgaacatccgaataccgcaaactcgtaaagcagcagaacaggaaaacatcacgcacacgttccaggtattgcttatccttgggtatctggtagtctttcagcttgttcagttcatcccaagtcaggaagattacttttttcgaggtggttttcagtttcggtttgaacgtatcgtatgcaatgttctgatgatgtcctttcttgaagctccagcgcaggaaccatttgaggaatcccatttgcttgccgatggtgctgtttctcatatccttggtgtcacgcaggaagttgacgtattcgttcaatccaaactcgttgaaatagttgaacgttgcatcctccttgaactctttgaggtggttcctcactgctgcaaatttttcataggtggatgccgtccagttattctggttaccgcactcttttacaaactcatcgaacacctcccaaaagctgacaggggcttcttccggctgttcttcgctggtgtctttcattctcatgttgaaagcttccttcaactgttgggtcgttggcatgacctcctgcacctcaaattccttgaaaatattctggatttcggcatagtatttcagcaagtccgtattgatttcggctgcactttgctttagcttgttggtacatccgctctttacccgctgcttatctgcatcccatttggctacgtcaatccggtagcccgttgtaaactcgatgcgttggctggcaaagatgacacgcatacggatgggtacgttctctacgattggcacaccgttctttttccggctctccaatgcaaaaatgatgttgcgcttgatattcataattgggtgcgtttgaaattctacacccaaatatacacccaattattgagatagcaaaagacatttagaaacatttacttttactctatattgtaatttacacttgattatcagtcgtttgcagtcttatgatattctgtgaaagtataagttcgagagcctgtctctccgcaaaaaacgctgaaaatcagcagattgcaaaacaaacaccctgttttacacccaagaatgtaaagtcggctgtttttgttttatttaagataatacaaccactacataataaaagagtagcgatattaaaagaatccgatgagaaaagactaatatttatctatccattcagtttgatttttcaggactttacatcgtcctgaaagtatttgttggtaccggtaccgaggacgcgtaaacatttacagttgcatgtggcctattgtttttagccgttaaatattttataactattaaatagcgatacaaattgttcgaaactaatattgtttatatcatatattctcgcatgttttaaagctttattaaattgattttttgtaaacagtttttcgtactctttgttaacccatttcattacaaaagtttcatatttttttctctctttaaatgccatttttgctggctttctttttaatacaattaatgtgctatccactttaggttttggatggaaataatacctaggaatttttgctaatatagaaatatctacctctgccattaacagcaatgctagtgatctgtttgtatctaataacattttagcaaaaccatattccactattaaataacttattgtggctgaactttcaaaaacaatttttcgaattatatttgtgcttatgttgtaaggtatgctgccaaatattttatatggattgtggctaggaaatgtaaatttcagtatatcatcatttactatttgatagttaggataatttaagagcttattacgagttacctcacataatttagaatcaatttctatcgccgttacaaaattacatctctttaccaatccagcagtaaaatgacctttccctgcacctatttcaaagatgttatctttttcatctaaacttatgcaattcattattttttctatgtgatattttgaagtaataaaattttgactatcttttatatttactttgttcattataacctctccttaatttattgcatctcttttcgaatatttatgttttttgagaaaagaacgtactcatggttcatcccgatatgcgtatcggtctgtatatcagcaactttctatgtgtttcaactacaatagtcatctattctcatctttctgagtccaccccctgcaaagcccctctttacgacataaaaattcggtcggaaaaggtatgcaaaagatgtttctctctttaagagaaactcttcgggatgcaaaaatatgaaaataactccaattcaccaaattatatagcgacttttttacaaaatgctaaaatttgttgatttccgtcaagcaattgttgagcaaaaatgtcttttacgataaaatgatacctcaatatcaactgtttagcaaaacgatatttctcttaaagagagaaacacctttttgttcaccaatccccgacttttaatcccgcggccatgattgaaaaaggaagagtatgagtattcaacatttccgtgtcgcccttattcccttttttgcggcattttgccttcctgtttttgctcacccagaaacgctggtgaaagtaaaagatgctgaagatcagttgggtgcacgagtgggttacatcgaactggatctcaacagcggtaagatccttgagagttttcgccccgaagaacgttttccaatgatgagcacttttaaagttctgctatgtggcgcggtattatcccgtattgacgccgggcaagagcaactcggtcgccgcatacactattctcagaatgacttggttgagtactcaccagtcacagaaaagcatcttacggatggcatgacagtaagagaattatgcagtgctgccataaccatgagtgataacactgcggccaacttacttctgacaacgatcggaggaccgaaggagctaaccgcttttttgcacaacatgggggatcatgtaactcgccttgatcgttgggaaccggagctgaatgaagccataccaaacgacgagcgtgacaccacgatgcctgtagcaatggcaacaacgttgcgcaaactattaactggcgaactacttactctagcttcccggcaacaattaatagactggatggaggcggataaagttgcaggaccacttctgcgctcggcccttccggctggctggtttattgctgataaatctggagccggtgagcgtgggtctcgcggtatcattgcagcactggggccagatggtaagccctcccgtatcgtagttatctacacgacggggagtcaggcaactatggatgaacgaaatagacagatcgctgagataggtgcctcactgattaagcattggtaactgtcagaccaagtttactcataacgcgtcaattcgagggggatcaattccgtgataggtgggctgcccttcctggttggcttggtttcatcagccatccgcttgccctcatctgttacgccggcggtagccggccagcctcgcagagcaggattcccgttgagcaccgccaggtgcgaataagggacagtgaagaaggaacacccgctcgcgggtgggcctacttcacctatcctgcccggctgacgccgttggatacaccaaggaaagtctacacgaaccctttggcaaaatcctgtatatcgtgcgaaaaaggatggatataccgaaaaaatcgctataatgaccccgaagcagggttatgcagcggaaaacggaattgatccggccacgatgcgtccggcgtagaggatctgaagatcagcagttcaacctgttgatagtacgtactaagctctcatgtttcacgtactaagctctcatgtttaacgtactaagctctcatgtttaacgaactaaaccctcatggctaacgtactaagctctcatggctaacgtactaagctctcatgtttcacgtactaagctctcatgtttgaacaataaaattaatataaatcagcaacttaaatagcctctaaggttttaagttttataagaaaaaaaagaatatataaggcttttaaagcttttaag

SEQ ID NO: 56 - DNA, 8543 bp, synthetic construct
  misc_feature 1..8543: note = Description of sequence: pBH206
  source 1..8543: mol_type = other DNA
gtttaacggttgtggacaacaagccagggatgtaacgcactgagaagcccttagagcctctcaaagcaattttgagtgacacaggaacacttaacggctgacatgggaattcccctccaccgcggtggtacaaagaaaattcgacaaactgttatttttctatctatttatttgaattaggagcgctcctaatttacctttgtcggcaattaggagcgctcctaattaaataaagatattctcgtcaaacaaatataaataatataaacatggtttttactctggaagattttgttggcgattggcgtcagaccgcgggttataatttggatcaagtcctggaacagggtggcgtaagctctctgttccagaacctgggtgtgagcgtgacgccgattcagcgcatcgttctgtccggcgagaacggtctgaaaattgatattcatgtgatcatcccgtacgaaggcctgagcggtgaccaaatgggtcaaatcgagaaaatctttaaagtcgtctacccagttgacgatcaccacttcaaggttatcttgcattacggtacgctggtgattgatggtgtgaccccgaatatgattgactatttcggccgtccgtatgaaggcattgccgtttttgacggtaaaaagatcaccgtcaccggtaccctgtggaatggcaataagattattgacgagcgtctgattaacccggacggcagcctgctgttccgcgtgaccatcaacggtgtcacgggttggcgtctgtgcgagcgcatcctggcataatgaactgcacttgctttgataattaatgataaacaatctaaaagcactctaatcgttatcggagtgcttttagattactaatcaaattgcttctactaattgcctatcttccagtgatggaacagcatttgtgcattggctgcaacaatcagccttgatctggaagaagcaatgaaagctgctgttaagtctccgaatcaggtattgttcctgacaggtgtattcccatccggtaaacgcggatactttgcagttgatctgactcaggaataaattataaattaaggtaagaagattgtaggataagctaatgaaatagaaaaaggatgccgtcacacaacttgtcggcattcttttttgttttattagttgaaaatatagtgaaaaagttgcctaaatatgtatgttaacaaattatttgtcgtaactttgcactccaaatctgtttttaacatatggcactagtgaaaccagtaacgttatacgatgtcgcagagtatgccggtgtctctaaaagcaccgtttccctggtggtgaaccaggccagccacgtttctgcgaaaacgcgggaaaaagtggaagcggcgatggcggagctgaattacattcccaaccgcgtggcacaacaactggcgggcaaacagtcgttgctgattggcgttgccacctccagtctggccctgcacgcgctgtcgcaaattgtcgcggcgattaaatctcgcgcctatcaactgggtgccagcgtgttcgtgtcgatggtagaacgaagcggcatcgaagcctgtaaaacggcggtgcacaatcttctcgcgcaacgcgtcagtgggctgatcattaactatccgctggataaccaggatgccattgctgtggaagctgcctgcactaatgttccggcgttatttcttgatgtctctgaccagacacccatcaacagtattattttctcccatgaagacggtacgcgactgggcgtggagcatctggtcgcattgggtcaccagcaaatcgcgctgttagcgggcccattaagttctgtctcggcgcgtctgcgtctggctggctggcataaatatctcactcgcaatcaaattcagccgatagcggaacgggaaggcgactggagtgccatgtccggttttcaacaaaccatgcaaatgctgaatgagggcatcgttcccactgcgatgctggttgccaacgatcagatggcgctgggcgcaatgcgcgccattaccgagaccgggctgcgcgttggtgcggatatctcggtagtgggatacgacgataccgaagacagctcatgttatatcccgccgttaaccaccatcaaacaggattttcgcctgctggggcaaaccagcgtggaccgcttgctgcaactctctcagggccaggcggtgaagggcaatcagctgttgcccgtctcactggtgaaaagaaaaaccaccctggcgcccaatacgcaaaccgcctctccccgcgcgttggccgattcattaatgcagctggcacgacaggtttcccgactggaaagcgggcagtgagctttcctcggtaccaaattccagaaaagaggcctcccgaaaggggggccttttttcgttttggtcctacttgtgcctgttctatttccgaaccgaccgcttgtatgaatccatcaaaattcgttttctctatgttggattccttgtttgatctggaagaagcaatgaaagctgctgttaagtctccgaatcaggtattgttcctgacaggtgtattcccatccggtaaacgcggatactttgcagttgatctgactcaggaataaattataaattaaggtaagaagattgtaggataagctaatgaaatagaaaaaggatgccgtcacacaacttgtcggcattcttttttgttttattagttgaaaatatagtgaaaaagttgcctaaatatgtatgttaacaaattatttgtcgtaactttgcactccaaatctgtttttaacatatggcactagtgaaaccagtaacgttatacgatgtcgcagagtatgccggtgtctctaaaagcaccgtttccctggtggtgaaccaggccagccacgtttctgcgaaaacgcgggaaaaagtggaagcggcgatggcggagctcaattacattcccaaccgcgtggcacaacaactggcgggcaaagcgtcgcataccattggcatgttgatcactgccagtaccaatcctttctattcagaactggtgcgtggcgttgaacgcagctgcttcgaacgcggttatagtctcgatctttgcaataccgaaggcgatgaacagcggatgaatcgcaatctggaaacgctgatgcaaaaacgcgttgatggcttgctgttactgtgcaccgaaacgcatcaaccttcgcgtgaaatcatgcaacgttatccgacagtgcctactgtgatgatggactgggctccgttcgatggcgacagcgatcttattcaggataactcgttgctgggcggagacttagcaacgcaatatctgatcgataaaggtcatacccgtatcgcctgtattaccggcccgctggataaaactccggcgcgcctgcggttggaaggttatcgggcggcgatgaaacgtgcgggtctcaacattcctgatggctatgaagtcactggtgattttgaatttaacggcgggtttgacgctatgcgccaactgctatcacatccgctgcgtcctcaggccgtctttaccggaaatgacgctatggctgttggcgtttaccaggcgttatatcaggcagagttacaggttccgcaggatatcgcggtgattggctatgacgatatcgaactggcaagctttatgacgccaccattaaccactatccaccaaccgaaagatgaactgggggagctggcgattgatgtactcatccatcggataacccagccgacccttcagcaacaacgattacaacttactccgattctgatggaacgcggttcggcttagctggtgaaaagaaaaaccaccctggcgcccaatacgcaaaccgcctctccccgcgcgttggccgattcattaatgcagctggcacgacaggtttcccgactggaaagcgggcagtgagctttcctcggtaccaaattccagaaaagaggcctcccgaaaggggggccttttttcgttttggtccgctcatattgtgatgataatttctacaaatatagtcattggtaactatctatgaaactgtttgatacttttatagttgattaaacttgttcatggcatttgccttaatatcatccgctatgtcaatgtagggtttcatagctttgtagtcgctgtgtcccgtccatttcatgaccacctgtgccgggattccgagagccagcgcattgcagatgaatgtccttcttcctgcatgggtactgagcaaagcgtatttgggtgtgacttcatcaatacgttcatttcccttgtagtaggtttcccgtacaggctcgttgatttctgccagttcgcccagctctttcaggtaatcgttcatcttctggttgctgatgacgggcagagccatgtaattctcgaaatggatgtccttgtatttgtccagtatggctttgctgtatttgttcagttcaatcgtcaggctgtcggcagtcttgactgtggttatttcgatgtggtcggacttcacatcgcttcttttcagattgcgaacatccgaataccgcaaactcgtaaagcagcagaacaggaaaacatcacgcacacgttccaggtattgcttatccttgggtatctggtagtctttcagcttgttcagttcatcccaagtcaggaagattacttttttcgaggtggttttcagtttcggtttgaacgtatcgtatgcaatgttctgatgatgtcctttcttgaagctccagcgcaggaaccatttgaggaatcccatttgcttgccgatggtgctgtttctcatatccttggtgtcacgcaggaagttgacgtattcgttcaatccaaactcgttgaaatagttgaacgttgcatcctccttgaactctttgaggtggttcctcactgctgcaaatttttcataggtggatgccgtccagttattctggttaccgcactcttttacaaactcatcgaacacctcccaaaagctgacaggggcttcttccggctgttcttcgctggtgtctttcattctcatgttgaaagcttccttcaactgttgggtcgttggcatgacctcctgcacctcaaattccttgaaaatattctggatttcggcatagtatttcagcaagtccgtattgatttcggctgcactttgctttagcttgttggtacatccgctctttacccgctgcttatctgcatcccatttggctacgtcaatccggtagcccgttgtaaactcgatgcgttggctggcaaagatgacacgcatacggatgggtacgttctctacgattggcacaccgttctttttccggctctccaatgcaaaaatgatgttgcgcttgatattcataattgggtgcgtttgaaattctacacccaaatatacacccaattattgagatagcaaaagacatttagaaacatttacttttactctatattgtaatttacacttgattatcagtcgtttgcagtcttatgatattctgtgaaagtataagttcgagagcctgtctctccgcaaaaaacgctgaaaatcagcagattgcaaaacaaacaccctgttttacacccaagaatgtaaagtcggctgtttttgttttatttaagataatacaaccactacataataaaagagtagcgatattaaaagaatccgatgagaaaagactaatatttatctatccattcagtttgatttttcaggactttacatcgtcctgaaagtatttgttggtaccggtaccgaggacgcgtaaacatttacagttgcatgtggcctattgtttttagccgttaaatattttataactattaaatagcgatacaaattgttcgaaactaatattgtttatatcatatattctcgcatgttttaaagctttattaaattgattttttgtaaacagtttttcgtactctttgttaacccatttcattacaaaagtttcatatttttttctctctttaaatgccatttttgctggctttctttttaatacaattaatgtgctatccactttaggttttggatggaaataatacctaggaatttttgctaatatagaaatatctacctctgccattaacagcaatgctagtgatctgtttgtatctaataacattttagcaaaaccatattccactattaaataacttattgtggctgaactttcaaaaacaatttttcgaattatatttgtgcttatgttgtaaggtatgctgccaaatattttatatggattgtggctaggaaatgtaaatttcagtatatcatcatttactatttgatagttaggataatttaagagcttattacgagttacctcacataatttagaatcaatttctatcgccgttacaaaattacatctctttaccaatccagcagtaaaatgacctttccctgcacctatttcaaagatgttatctttttcatctaaacttatgcaattcattattttttctatgtgatattttgaagtaataaaattttgactatcttttatatttactttgttcattataacctctccttaatttattgcatctcttttcgaatatttatgttttttgagaaaagaacgtactcatggttcatcccgatatgcgtatcggtctgtatatcagcaactttctatgtgtttcaactacaatagtcatctattctcatctttctgagtccaccccctgcaaagcccctctttacgacataaaaattcggtcggaaaaggtatgcaaaagatgtttctctctttaagagaaactcttcgggatgcaaaaatatgaaaataactccaattcaccaaattatatagcgacttttttacaaaatgctaaaatttgttgatttccgtcaagcaattgttgagcaaaaatgtcttttacgataaaatgatacctcaatatcaactgtttagcaaaacgatatttctcttaaagagagaaacacctttttgttcaccaatccccgacttttaatcccgcggccatgattgaaaaaggaagagtatgagtattcaacatttccgtgtcgcccttattcccttttttgcggcattttgccttcctgtttttgctcacccagaaacgctggtgaaagtaaaagatgctgaagatcagttgggtgcacgagtgggttacatcgaactggatctcaacagcggtaagatccttgagagttttcgccccgaagaacgttttccaatgatgagcacttttaaagttctgctatgtggcgcggtattatcccgtattgacgccgggcaagagcaactcggtcgccgcatacactattctcagaatgacttggttgagtactcaccagtcacagaaaagcatcttacggatggcatgacagtaagagaattatgcagtgctgccataaccatgagtgataacactgcggccaacttacttctgacaacgatcggaggaccgaaggagctaaccgcttttttgcacaacatgggggatcatgtaactcgccttgatcgttgggaaccggagctgaatgaagccataccaaacgacgagcgtgacaccacgatgcctgtagcaatggcaacaacgttgcgcaaactattaactggcgaactacttactctagcttcccggcaacaattaatagactggatggaggcggataaagttgcaggaccacttctgcgctcggcccttccggctggctggtttattgctgataaatctggagccggtgagcgtgggtctcgcggtatcattgcagcactggggccagatggtaagccctcccgtatcgtagttatctacacgacggggagtcaggcaactatggatgaacgaaatagacagatcgctgagataggtgcctcactgattaagcattggtaactgtcagaccaagtttactcataacgcgtcaattcgagggggatcaattccgtgataggtgggctgcccttcctggttggcttggtttcatcagccatccgcttgccctcatctgttacgccggcggtagccggccagcctcgcagagcaggattcccgttgagcaccgccaggtgcgaataagggacagtgaagaaggaacacccgctcgcgggtgggcctacttcacctatcctgcccggctgacgccgttggatacaccaaggaaagtctacacgaaccctttggcaaaatcctgtatatcgtgcgaaaaaggatggatataccgaaaaaatcgctataatgaccccgaagcagggttatgcagcggaaaacggaattgatccggccacgatgcgtccggcgtagaggatctgaagatcagcagttcaacctgttgatagtacgtactaagctctcatgtttcacgtactaagctctcatgtttaacgtactaagctctcatgtttaacgaactaaaccctcatggctaacgtactaagctctcatggctaacgtactaagctctcatgtttcacgtactaagctctcatgtttgaacaataaaattaatataaatcagcaacttaaatagcctctaaggttttaagttttataagaaaaaaaagaatatataaggcttttaaagcttttaag

SEQ ID NO: 57 - DNA, 8631 bp, synthetic construct
  misc_feature 1..8631: note = Description of sequence: pBH207
  source 1..8631: mol_type = other DNA
gtttaacggttgtggacaacaagccagggatgtaacgcactgagaagcccttagagcctctcaaagcaattttgagtgacacaggaacacttaacggctgacatgggaattcccctccaccgcggtggccctgtacaaagaaaattcgacaaactgttatttttctatctatttatttgaattgtgagcggataacaattacctttgtcggcaattgtgagcggataacaattaaataaagatattctcgtcaaacaaatataaataatataaacatggtttttactctggaagattttgttggcgattggcgtcagaccgcgggttataatttggatcaagtcctggaacagggtggcgtaagctctctgttccagaacctgggtgtgagcgtgacgccgattcagcgcatcgttctgtccggcgagaacggtctgaaaattgatattcatgtgatcatcccgtacgaaggcctgagcggtgaccaaatgggtcaaatcgagaaaatctttaaagtcgtctacccagttgacgatcaccacttcaaggttatcttgcattacggtacgctggtgattgatggtgtgaccccgaatatgattgactatttcggccgtccgtatgaaggcattgccgtttttgacggtaaaaagatcaccgtcaccggtaccctgtggaatggcaataagattattgacgagcgtctgattaacccggacggcagcctgctgttccgcgtgaccatcaacggtgtcacgggttggcgtctgtgcgagcgcatcctggcataatgaactgcacttgctttgataattaatgataaacaatctaaaagcactctaatcgttatcggagtgcttttagattactaatcaaattgcttctactaattgcctatcttccagtgatggaacagcatttgaacgcattggctgcaacaatcagccttgatctggaagaagcaatgaaagctgctgttaagtctccgaatcaggtattgttcctgacaggtgtattcccatccggtaaacgcggatactttgcagttgatctgactcaggaataaattataaattaaggtaagaagattgtaggataagctaatgaaatagaaaaaggatgccgtcacacaacttgtcggcattcttttttgttttattagttgaaaatatagtgaaaaagttgcctaaatatgtatgttaacaaattatttgtcgtaactttgcactccaaatctgtttttaacatatggcactagtgaaaccagtaacgttatacgatgtcgcagagtatgccggtgtctcttatcagaccgtttcccgcgtggtgaaccaggccagccacgtttctgcgaaaacgcgggaaaaagtggaagcggcgatggcggagctgaattacattcccaaccgcgtggcacaacaactggcgggcaaacagtcgttgctgattggcgttgccacctccagtctggccctgcacgcgccgtcgcaaattgtcgcggcgattaaatctcgcgccgatcaactgggtgccagcgtggtggtgtcgatggtagaacgaagcggcgtcgaagcctgtaaaacggcggtgcacaatcttctcgcgcaacgcgtcagtgggctgatcattaactatccgctggatgaccaggatgccattgctgtggaagctgcctgcactaatgttccggcgttatttcttgatgtctctgaccagacacccatcaacagtattattttctcccatgaagacggtacgcgactgggcgtggagcatctggtcgcattgggtcaccagcaaatcgcgctgttagcgggcccattaagttctgtctcggcgcgtctgcgtctggctggctggcataaatatctcactcgcaatcaaattcagccgatagcggaacgggaaggcgactggagtgccatgtccggttttcaacaaaccatgcaaatgctgaatgagggcatcgttcccactgcgatgctggttgccaacgatcagatggcgctgggcgcaatgcgcgccattaccgagtccgggctgcgcgttggtgcggatatctcggtagtgggatacgacgataccgaagacagctcatgttatatcccgccgttaaccaccatcaaacaggattttcgcctgctggggcaaaccagcgtggaccgcttgctgcaactctctcagggccaggcggtgaagggcaatcagctgttgcccgtctcactggtgaaaagaaaaaccaccctggcgcccaatacgcaaaccgcctctccccgcgcgttggccgattcattaatgcagctggcacgacaggtttcccgactggaaagcgggcagtgagtgcaacaatcagccttgatctggaagaagcaatgaaagctgctgttaagtctccgaatcaggtattgttcctgacaggtgtattcccatccggtaaacgcggatactttgcagttgatctgactcaggaataaattataaattaaggtaagaagattgtaggataagctaatgaaatagaaaaaggatgccgtcacacaacttgtcggcattcttttttgttttattagttgaaaatatagtgaaaaagttgcctaaatatgtatgttaacaaattatttgtcgtaactttgcactccaaatctgtttttaacatatggcactagtgaaaccagtaacgttatacgatgtcgcagagtatgccggtgtctcttatcagaccgtttcccgcgtggtgaaccaggccagccacgtttctgcgaaaacgcgggaaaaagtggaagcggcgatggcggagctcaattacattcccaaccgcgtggcacaacaactggcgggcaaagcgtcgcataccattggcatgttgatcactgccagtaccaatcctttctattcagaactggtgcgtggcgttgaacgcagctgcttcgaacgcggttatagtctcgatctttgcaataccgaaggcgatgaacagcggatgaatcgcaatctggaaacgctgatgcaaaaacgcgttgatggcttgctgttactgtgcaccgaaacgcatcaaccttcgcgtgaaatcatgcaacgttatccgacagtgcctactgtgatgatggactgggctccgttcgatggcgacagcgatcttattcaggataactcgttgctgggcggagacttagcaacgcaatatctgatcgataaaggtcatacccgtatcgcctgtattaccggcccgctggataaaactccggcgcgcctgcggttggaaggttatcgggcggcgatgaaacgtgcgggtctcaacattcctgatggctatgaagtcactggtgattttgaatttaacggcgggtttgacgctatgcgccaactgctatcacatccgctgcgtcctcaggccgtctttaccggaaatgacgctatggctgttggcgtttaccaggcgttatatcaggcagagttacaggttccgcaggatatcgcggtgattggctatgacgatatcgaactggcaagctttatgacgccaccattaaccactatccaccaaccgaaagatgaactgggggagctggcgattgatgtactcatccatcggataacccagccgacccttcagcaacaacgattacaacttactccgattctgatggaacgcggttcggcttagctggtgaaaagaaaaaccaccctggcgcccaatacgcaaaccgcctctccccgcgcgttggccgattcattaatgcagctggcacgacaggtttcccgactggaaagcgggcagtgagctttcctcggtaccaaattccagaaaagaggcctcccgaaaggggggccttttttcgttttggtcctacttgtgcctgttctatttccatcccggttcctggccttttgctggccttttgctcacatgttctttcctgcgttatcccctgattctgtggataaccgtattaccgcctttgagtgagctgatacccgatacttgtgcctgttctatttccgaaccgaccgcttgtatgaatccatcaaaattcgttttctctatgttggattccttgttgctcatattgtgatgataatttctacaaatatagtcattggtaactatctatgaaactgtttgatacttttatagttgattaaacttgttcatggcatttgccttaatatcatccgctatgtcaatgtagggtttcatagctttgtagtcgctgtgtcccgtccatttcatgaccacctgtgccgggattccgagagccagcgcattgcagatgaatgtccttcttcctgcatgggtactgagcaaagcgtatttgggtgtgacttcatcaatacgttcatttcccttgtagtaggtttcccgtacaggctcgttgatttctgccagttcgcccagctctttcaggtaatcgttcatcttctggttgctgatgacgggcagagccatgtaattctcgaaatggatgtccttgtatttgtccagtatggctttgctgtatttgttcagttcaatcgtcaggctgtcggcagtcttgactgtggttatttcgatgtggtcggacttcacatcgcttcttttcagattgcgaacatccgaataccgcaaactcgtaaagcagcagaacaggaaaacatcacgcacacgttccaggtattgcttatccttgggtatctggtagtctttcagcttgttcagttcatcccaagtcaggaagattacttttttcgaggtggttttcagtttcggtttgaacgtatcgtatgcaatgttctgatgatgtcctttcctgaagctccagcgcaggaaccatttgaggaatcccatttgcttgccgatggtgctgtttctcatatccttggtgtcacgcaggaagttgacgtattcgttcaatccaaactcgttgaaatagttgaacgttgcatcctccttgaactctttgaggtggttcctcactgctgcaaatttttcataggtggatgccgtccagttattctggttaccgcactcttttacaaactcatcgaacacctcccaaaagctgacaggggcttcttccggctgttcttcactggtgtctttcattctcatgttgaaagcttccttcaactgttgggtcgttggcatgacctcctgcacctcaaattccttgaaaatattctggatttcggcatagtatttcagcaagtccgtattgatttcggctgcactttgctttagcttgttggtacatccgttctttacccgctgcttatctacatcccatttggctacgtcaatccggtagcccgttgtaaactcgatacgttggctggcaaagatgacacgcatacggatgggtacgttctctacgattggcacaccgttctttttccggctctccaatgcaaaaatgatgttgcgcttgatattcataattgggtgcgtttgaaattctacacccaaatatacacccaattattgagatagcaaaagacatttagaaacatttacttttactctatattgtaatttacacttgattatcagtcgtttgcagttttatgatattctgtgaaagtataagttcgagagcctgtctctccgcaaaaaacgctgaaaatcagcagattgcaaaacaaacaccctgttttacacccaagaatgtaaagtcggctgtttttgttttatttaagataatacaaccactacataataaaagagtagcgatattaaaagaatccgatgagaaaagactaatatttatctatccattcagtttgatttttcaggactttacatcgtcctgaaagtatttgttggtaccggtaccgaggacgcgtaaacatttacagttgcatgtggcctattgtttttagccgttaaatattttataactattaaatagcgatacaaattgttcgaaactaatattgtttatatcatatattctcgcatgttttaaagctttattaaattgattttttgtaaacagtttttcgtactctttgttaacccatttcattacaaaagtttcatatttttttctctctttaaatgccatttttgctggctttctttttaatacaattaatgtgctatccactttaggttttggatggaaataatacctaggaatttttgctaatatagaaatatctacctctgccattaacagcaatgctagtgatctgtttgtatctaataacattttagcaaaaccatattccactattaaataacttattgtggctgaactttcaaaaacaatttttcgaattatatttgtgcttatgttgtaaggtatgctgccaaatattttatatggattgtggctaggaaatgtaaatttcagtatatcatcatttactatttgatagttaggataatttaagagcttattacgagttacctcacataatttagaatcaatttctatcgccgttacaaaattacatctctttaccaatccagcagtaaaatgacctttccctgcacctatttcaaagatgttatctttttcatctaaacttatgcaattcattattttttctatgtgatattttgaagtaataaaattttgactatcttttatatttactttgttcattataacctctccttaatttattgcatctcttttcgaatatttatgttttttgagaaaagaacgtactcatggttcatcccgatatgcgtatcggtctgtatatcagcaactttctatgtgtttcaactacaatagtcatctattctcatctttctgagtccaccccctgcaaagcccctctttacgacataaaaattcggtcggaaaaggtatgcaaaagatgtttctctctttaagagaaactcttcgggatgcaaaaatatgaaaataactccaattcaccaaattatatagcgacttttttacaaaatgctaaaatttgttgatttccgtcaagcaattgttgagcaaaaatgtcttttacgataaaatgatacctcaatatcaactgtttagcaaaacgatatttctcttaaagagagaaacacctttttgttcaccaatccccgacttttaatcccgcggccatgattgaaaaaggaagagtatgagtattcaacatttccgtgtcgcccttattcccttttttgcggcattttgccttcctgtttttgctcacccagaaacgctggtgaaagtaaaagatgctgaagatcagttgggtgcacgagtgggttacatcgaactggatctcaacagcggtaagatccttgagagttttcgccccgaagaacgttttccaatgatgagcacttttaaagttctgctatgtggcgcggtattatcccgtattgacgccgggcaagagcaactcggtcgccgcatacactattctcagaatgacttggttgagtactcaccagtcacagaaaagcatcttacggatggcatgacagtaagagaattatgcagtgctgccataaccatgagtgataacactgcggccaacttacttctgacaacgatcggaggaccgaaggagctaaccgcttttttgcacaacatgggggatcatgtaactcgccttgatcgttgggaaccggagctgaatgaagccataccaaacgacgagcgtgacaccacgatgcctgtagcaatggcaacaacgttgcgcaaactattaactggcgaactacttactctagcttcccggcaacaattaatagactggatggaggcggataaagttgcaggaccacttctgcgctcggcccttccggctggctggtttattgctgataaatctggagccggtgagcgtgggtctcgcggtatcattgcagcactggggccagatggtaagccctcccgtatcgtagttatctacacgacggggagtcaggcaactatggatgaacgaaatagacagatcgctgagataggtgcctcactgattaagcattggtaactgtcagaccaagtttactcataacgcgtcaattcgagggggatcaattccgtgataggtgggctgcccttcctggttggcttggtttcatcagccatccgcttgccctcatctgttacgccggcggtagccggccagcctcgcagagcaggattcccgttgagcaccgccaggtgcgaataagggacagtgaagaaggaacacccgctcgcgggtgggcctacttcacctatcctgcccggctgacgccgttggatacaccaaggaaagtctacacgaaccctttggcaaaatcctgtatatcgtgcgaaaaaggatggatataccgaaaaaatcgctataatgaccccgaagcagggttatgcagcggaaaacggaattgatccggccacgatgcgtccggcgtagaggatctgaagatcagcagttcaacctgttgatagtacgtactaagctctcatgtttcacgtactaagctctcatgtttaacgtactaagctctcatgtttaacgaactaaaccctcatggctaacgtactaagctctcatggctaacgtactaagctctcatgtttcacgtactaagctctcatgtttgaacaataaaattaatataaatcagcaacttaaatagcctctaaggttttaagttttataagaaaaaaaagaatatataaggcttttaaagcttttaag

SEQ ID NO: 58 - DNA, 8630 bp, synthetic construct
  misc_feature 1..8630: note = Description of sequence: pBH208
  source 1..8630: mol_type = other DNA
gtttaacggttgtggacaacaagccagggatgtaacgcactgagaagcccttagagcctctcaaagcaattttgagtgacacaggaacacttaacggctgacatgggaattcccctccaccgcggtggccctgtacaaagaaaattcgacaaactgttatttttctatctatttatttgaattttaagcgcttaaaatttacctttgtcggcaattttaagcgcttaaaattaaataaagatattctcgtcaaacaaatataaataatataaacatggtttttactctggaagattttgttggcgattggcgtcagaccgcgggttataatttggatcaagtcctggaacagggtggcgtaagctctctgttccagaacctgggtgtgagcgtgacgccgattcagcgcatcgttctgtccggcgagaacggtctgaaaattgatattcatgtgatcatcccgtacgaaggcctgagcggtgaccaaatgggtcaaatcgagaaaatctttaaagtcgtctacccagttgacgatcaccacttcaaggttatcttgcattacggtacgctggtgattgatggtgtgaccccgaatatgattgactatttcggccgtccgtatgaaggcattgccgtttttgacggtaaaaagatcaccgtcaccggtaccctgtggaatggcaataagattattgacgagcgtctgattaacccggacggcagcctgctgttccgcgtgaccatcaacggtgtcacgggttggcgtctgtgcgagcgcatcctggcataatgaactgcacttgctttgataattaatgataaacaatctaaaagcactctaatcgttatcggagtgcttttagattactaatcaaattgcttctactaattgcctatcttccagtgatggaacagcatttgaacgcattggctgcaacaatcagccttgatctggaagaagcaatgaaagctgctgttaagtctccgaatcaggtattgttcctgacaggtgtattcccatccggtaaacgcggatactttgcagttgatctgactcaggaataaattataaattaaggtaagaagattgtaggataagctaatgaaatagaaaaaggatgccgtcacacaacttgtcggcattcttttttgttttattagttgaaaatatagtgaaaaagttgcctaaatatgtatgttaacaaattatttgtcgtaactttgcactccaaatctgtttttaacatatggcactagtgaaaccagtaacgttatacgatgtcgcagagtatgccggtgtctctaccgcgaccgtttccaacgtggtgaaccaggccagccacgtttctgcgaaaacgcgggaaaaagtggaagcggcgatggcggagctgaattacattcccaaccgcgtggcacaacaactggcgggcaaacagtcgttgctgattggcgttgccacctccagtctggccctgcacgcgccgtcgcaaattgtcgcggcgattaaatctcgcgccgatcaactgggtgccagcgtggtggtgtcgatggtagaacgaagcggcgtcgaagcctgtaaaacggcggtgcacaatcttctcgcgcaacgcgtcagtgggctgatcattaactatccgctggatgaccaggatgccattgctgtggaagctgcctgcactaatgttccggcgttatttcttgatgtctctgaccagacacccatcaacagtattattttctcccatgaagacggtacgcgactgggcgtggagcatctggtcgcattgggtcaccagcaaatcgcgctgttagcgggcccattaagttctgtctcggcgcgtctgcgtctggctggctggcataaatatctcactcgcaatcaaattcagccgatagcggaacgggaaggcgactggagtgccatgtccggttttcaacaaaccatgcaaatgctgaatgagggcatcgttcccactgcgatgctggttgccaacgatcagatggcgctgggcgcaatgcgcgccattaccgagtccgggctgcgcgttggtgcggatatctcggtagtgggatacgacgataccgaagacagctcatgttatatcccgccgttaaccaccatcaaacaggattttcgcctgctggggcaaaccagcgtggaccgcttgctgcaactctctcagggccaggcggtgaagggcaatcagctgttgcccgtctcactggtgaaaagaaaaaccaccctggcgcccaatacgcaaaccgcctctccccgcgcgttggccgattcattaatgcagctggcacgacaggtttcccgactggaaagcgggcagtgagtgcaacaatcagccttgatctggaagaagcaatgaaagctgctgttaagtctccgaatcaggtattgttcctgacaggtgtattcccatccggtaaacgcggatactttgcagttgatctgactcaggaataaattataaattaaggtaagaagattgtaggataagctaatgaaatagaaaaaggatgccgtcacacaacttgtcggcattcttttttgttttattagttgaaaatatagtgaaaaagttgcctaaatatgtatgttaacaaattatttgtcgtaactttgcactccaaatctgtttttaacatatggcactagtgaaaccagtaacgttatacgatgtcgcagagtatgccggtgtctctaccgcgaccgtttccaacgtggtgaaccaggccagccacgtttctgcgaaaacgcgggaaaaagtggaagcggcgatggcggagctcaattacattcccaaccgcgtggcacaacaactggcgggcaaagcgtcgcataccattggcatgttgatcactgccagtaccaatcctttctattcagaactggtgcgtggcgttgaacgcagctgcttcgaacgcggttatagtctcgatctttgcaataccgaaggcgatgaacagcggatgaatcgcaatctggaaacgctgatgcaaaaacgcgttgatggcttgctgttactgtgcaccgaaacgcatcaaccttcgcgtgaaatcatgcaacgttatccgacagtgcctactgtgatgatggactgggctccgttcgatggcgacagcgatcttattcaggataactcgttgctgggcggagacttagcaacgcaatatctgatcgataaaggtcatacccgtatcgcctgtattaccggcccgctggataaaactccggcgcgcctgcggttggaaggttatcgggcggcgatgaaacgtgcgggtctcaacattcctgatggctatgaagtcactggtgattttgaatttaacggcgggtttgacgctatgcgccaactgctatcacatccgctgcgtcctcaggccgtctttaccggaaatgacgctatggctgttggcgtttaccaggcgttatatcaggcagagttacaggttccgcaggatatcgcggtgattggctatgacgatatcgaactggcaagctttatgacgccaccattaaccactatccaccaaccgaaagatgaactgggggagctggcgattgatgtactcatccatcggataacccagccgacccttcagcaacaacgattacaacttactccgattctgatggaacgcggttcggcttagctggtgaaaagaaaaaccaccctggcgcccaatacgcaaaccgcctctccccgcgcgttggccgattcattaatgcagctggcacgacaggtttcccgactggaaagcgggcagtgagctttcctcggtaccaaattccagaaaagaggcctcccgaaaggggggccttttttcgttttggtcctacttgtgcctgttctatttccatcccggttcctggccttttgctggccttttgctcacatgttctttcctgcgttatcccctgattctgtggataaccgtattaccgcctttgagtgagctgatacccgatacttgtgcctgttctatttccgaaccgaccgcttgtatgaatccatcaaaattcgttttctctatgttggattccttgttgctcatattgtgatgataatttctacaaatatagtcattggtaactatctatgaaactgtttgatacttttatagttgattaaacttgttcatggcatttgccttaatatcatccgctatgtcaatgtagggtttcatagctttgtagtcgctgtgtcccgtccatttcatgaccacctgtgccgggattccgagagccagcgcattgcagatgaatgtccttcttcctgcatgggtactgagcaaagcgtatttgggtgtgacttcatcaatacgttcatttcccttgtagtaggtttcccgtacaggctcgttgatttctgccagttcgcccagctctttcaggtaatcgttcatcttctggttgctgatgacgggcagagccatgtaattctcgaaatggatgtccttgtatttgtccagtatggctttgctgtatttgttcagttcaatcgtcaggctgtcggcagtcttgactgtggttatttcgatgtggtcggacttcacatcgcttcttttcagattgcgaacatccgaataccgcaaactcgtaaagcagcagaacaggaaaacatcacgcacacgttccaggtattgcttatccttgggtatctggtagtctttcagcttgttcagttcatcccaagtcaggaagattacttttttcgaggtggttttcagtttcggtttgaacgtatcgtatgcaatgttctgatgatgtcctttcctgaagctccagcgcaggaaccatttgaggaatcccatttgcttgccgatggtgctgtttctcatatccttggtgtcacgcaggaagttgacgtattcgttcaatccaaactcgttgaaatagttgaacgttgcatcctccttgaactctttgaggtggttcctcactgctgcaaatttttcataggtggatgccgtccagttattctggttaccgcactcttttacaaactcatcgaacacctcccaaaagctgacaggggcttcttccggctgttcttcactggtgtctttcattctcatgttgaaagcttccttcaactgttgggtcgttggcatgacctcctgcacctcaaattccttgaaaatattctggatttcggcatagtatttcagcaagtccgtattgatttcggctgcactttgctttagcttgttggtacatccgttctttacccgctgcttatctacatcccatttggctacgtcaatccggtagcccgttgtaaactcgatacgttggctggcaaagatgacacgcatacggatgggtacgttctctacgattggcacaccgttctttttccggctctccaatgcaaaaatgatgttgcgcttgatattcataattgggtgcgtttgaaattctacacccaaatatacacccaattattgagatagcaaaagacatttagaaacatttacttttactctatattgtaatttacacttgattatcagtcgtttgcagttttatgatattctgtgaaagtataagttcgagagcctgtctctccgcaaaaaacgctgaaaatcagcagattgcaaaacaaacaccctgttttacacccaagaatgtaaagtcggctgtttttgttttatttaagataatacaaccactacataataaaagagtagcgatattaaaagaatccgatgagaaaagactaatatttatctatccattcagtttgatttttcaggactttacatcgtcctgaaagtatttgttggtaccggtaccgaggacgcgtaaacatttacagttgcatgtggcctattgtttttagccgttaaatattttataactattaaatagcgatacaaattgttcgaaactaatattgtttatatcatatattctcgcatgttttaaagctttattaaattgattttttgtaaacagtttttcgtactctttgttaacccatttcattacaaaagtttcatatttttttctctctttaaatgccatttttgctggctttctttttaatacaattaatgtgctatccactttaggttttggatggaaataatacctaggaatttttgctaatatagaaatatctacctctgccattaacagcaatgctagtgatctgtttgtatctaataacattttagcaaaaccatattccactattaaataacttattgtggctgaactttcaaaaacaatttttcgaattatatttgtgcttatgttgtaaggtatgctgccaaatattttatatggattgtggctaggaaatgtaaatttcagtatatcatcatttactatttgatagttaggataatttaagagcttattacgagttacctcacataatttagaatcaatttctatcgccgttacaaaattacatctctttaccaatccagcagtaaaatgacctttccctgcacctatttcaaagatgttatctttttcatctaaacttatgcaattcattattttttctatgtgatattttgaagtaataaaattttgactatcttttatatttactttgttcattataacctctccttaatttattgcatctcttttcgaatatttatgttttttgagaaaagaacgtactcatggttcatcccgatatgcgtatcggtctgtatatcagcaactttctatgtgtttcaactacaatagtcatctattctcatctttctgagtccaccccctgcaaagcccctctttacgacataaaaattcggtcggaaaaggtatgcaaaagatgtttctctctttaagagaaactcttcgggatgcaaaaatatgaaaataactccaattcaccaaattatatagcgacttttttacaaaatgctaaaatttgttgatttccgtcaagcaattgttgagcaaaaatgtcttttacgataaaatgatacctcaatatcaactgtttagcaaaacgatatttctcttaaagagagaaacacctttttgttcaccaatccccgacttttaatcccgcggccatgattgaaaaaggaagagtatgagtattcaacatttccgtgtcgcccttattcccttttttgcggcattttgccttcctgtttttgctcacccagaaacgctggtgaaagtaaaagatgctgaagatcagttgggtgcacgagtgggttacatcgaactggatctcaacagcggtaagatccttgagagttttcgccccgaagaacgttttccaatgatgagcacttttaaagttctgctatgtggcgcggtattatcccgtattgacgccgggcaagagcaactcggtcgccgcatacactattctcagaatgacttggttgagtactcaccagtcacagaaaagcatcttacggatggcatgacagtaagagaattatgcagtgctgccataaccatgagtgataacactgcggccaacttacttctgacaacgatcggaggaccgaaggagctaaccgcttttttgcacaacatgggggatcatgtaactcgccttgatcgttgggaaccggagctgaatgaagccataccaaacgacgagcgtgacaccacgatgcctgtagcaatggcaacaacgttgcgcaaactattaactggcgaactacttactctagcttcccggcaacaattaatagactggatggaggcggataaagttgcaggaccacttctgcgctcggcccttccggctggctggtttattgctgataaatctggagccggtgagcgtgggtctcgcggtatcattgcagcactggggccagatggtaagccctcccgtatcgtagttatctacacgacggggagtcaggcaactatggatgaacgaaatagacagatcgctgagataggtgcctcactgattaagcattggtaactgtcagaccaagtttactcataacgcgtcaattcgagggggatcaattccgtgataggtgggctgcccttcctggttggcttggtttcatcagccatccgcttgccctcatctgttacgccggcggtagccggccagcctcgcagagcaggattcccgttgagcaccgccaggtgcgaataagggacagtgaagaaggaacacccgctcgcgggtgggcctacttcacctatcctgcccggctgacgccgttggatacaccaaggaaagtctacacgaaccctttggcaaaatcctgtatatcgtgcgaaaaaggatggatataccgaaaaaatcgctataatgaccccgaagcagggttatgcagcggaaaacggaattgatccggccacgatgcgtccggcgtagaggatctgaagatcagcagttcaacctgttgatagtacgtactaagctctcatgtttcacgtactaagctctcatgtttaacgtactaagctctcatgtttaacgaactaaaccctcatggctaacgtactaagctctcatggctaacgtactaagctctcatgtttcacgtactaagctctcatgtttgaacaataaaattaatataaatcagcaacttaaatagcctctaaggttttaagttttataagaaaaaaaagaatatataaggcttttaaagcttttaag

SEQ ID NO: 59 - DNA, 8630 bp, synthetic construct
  misc_feature 1..8630: note = Description of sequence: pBH209
  source 1..8630: mol_type = other DNA
gtttaacggttgtggacaacaagccagggatgtaacgcactgagaagcccttagagcctctcaaagcaattttgagtgacacaggaacacttaacggctgacatgggaattcccctccaccgcggtggccctgtacaaagaaaattcgacaaactgttatttttctatctatttatttgaattaggagcgctcctaatttacctttgtcggcaattaggagcgctcctaattaaataaagatattctcgtcaaacaaatataaataatataaacatggtttttactctggaagattttgttggcgattggcgtcagaccgcgggttataatttggatcaagtcctggaacagggtggcgtaagctctctgttccagaacctgggtgtgagcgtgacgccgattcagcgcatcgttctgtccggcgagaacggtctgaaaattgatattcatgtgatcatcccgtacgaaggcctgagcggtgaccaaatgggtcaaatcgagaaaatctttaaagtcgtctacccagttgacgatcaccacttcaaggttatcttgcattacggtacgctggtgattgatggtgtgaccccgaatatgattgactatttcggccgtccgtatgaaggcattgccgtttttgacggtaaaaagatcaccgtcaccggtaccctgtggaatggcaataagattattgacgagcgtctgattaacccggacggcagcctgctgttccgcgtgaccatcaacggtgtcacgggttggcgtctgtgcgagcgcatcctggcataatgaactgcacttgctttgataattaatgataaacaatctaaaagcactctaatcgttatcggagtgcttttagattactaatcaaattgcttctactaattgcctatcttccagtgatggaacagcatttgaacgcattggctgcaacaatcagccttgatctggaagaagcaatgaaagctgctgttaagtctccgaatcaggtattgttcctgacaggtgtattcccatccggtaaacgcggatactttgcagttgatctgactcaggaataaattataaattaaggtaagaagattgtaggataagctaatgaaatagaaaaaggatgccgtcacacaacttgtcggcattcttttttgttttattagttgaaaatatagtgaaaaagttgcctaaatatgtatgttaacaaattatttgtcgtaactttgcactccaaatctgtttttaacatatggcactagtgaaaccagtaacgttatacgatgtcgcagagtatgccggtgtctctaaaagcaccgtttccctggtggtgaaccaggccagccacgtttctgcgaaaacgcgggaaaaagtggaagcggcgatggcggagctgaattacattcccaaccgcgtggcacaacaactggcgggcaaacagtcgttgctgattggcgttgccacctccagtctggccctgcacgcgccgtcgcaaattgtcgcggcgattaaatctcgcgccgatcaactgggtgccagcgtggtggtgtcgatggtagaacgaagcggcgtcgaagcctgtaaaacggcggtgcacaatcttctcgcgcaacgcgtcagtgggctgatcattaactatccgctggatgaccaggatgccattgctgtggaagctgcctgcactaatgttccggcgttatttcttgatgtctctgaccagacacccatcaacagtattattttctcccatgaagacggtacgcgactgggcgtggagcatctggtcgcattgggtcaccagcaaatcgcgctgttagcgggcccattaagttctgtctcggcgcgtctgcgtctggctggctggcataaatatctcactcgcaatcaaattcagccgatagcggaacgggaaggcgactggagtgccatgtccggttttcaacaaaccatgcaaatgctgaatgagggcatcgttcccactgcgatgctggttgccaacgatcagatggcgctgggcgcaatgcgcgccattaccgagtccgggctgcgcgttggtgcggatatctcggtagtgggatacgacgataccgaagacagctcatgttatatcccgccgttaaccaccatcaaacaggattttcgcctgctggggcaaaccagcgtggaccgcttgctgcaactctctcagggccaggcggtgaagggcaatcagctgttgcccgtctcactggtgaaaagaaaaaccaccctggcgcccaatacgcaaaccgcctctccccgcgcgttggccgattcattaatgcagctggcacgacaggtttcccgactggaaagcgggcagtgagtgcaacaatcagccttgatctggaagaagcaatgaaagctgctgttaagtctccgaatcaggtattgttcctgacaggtgtattcccatccggtaaacgcggatactttgcagttgatctgactcaggaataaattataaattaaggtaagaagattgtaggataagctaatgaaatagaaaaaggatgccgtcacacaacttgtcggcattcttttttgttttattagttgaaaatatagtgaaaaagttgcctaaatatgtatgttaacaaattatttgtcgtaactttgcactccaaatctgtttttaacatatggcactagtgaaaccagtaacgttatacgatgtcgcagagtatgccggtgtctctaaaagcaccgtttccctggtggtgaaccaggccagccacgtttctgcgaaaacgcgggaaaaagtggaagcggcgatggcggagctcaattacattcccaaccgcgtggcacaacaactggcgggcaaagcgtcgcataccattggcatgttgatcactgccagtaccaatcctttctattcagaactggtgcgtggcgttgaacgcagctgcttcgaacgcggttatagtctcgatctttgcaataccgaaggcgatgaacagcggatgaatcgcaatctggaaacgctgatgcaaaaacgcgttgatggcttgctgttactgtgcaccgaaacgcatcaaccttcgcgtgaaatcatgcaacgttatccgacagtgcctactgtgatgatggactgggctccgttcgatggcgacagcgatcttattcaggataactcgttgctgggcggagacttagcaacgcaatatctgatcgataaaggtcatacccgtatcgcctgtattaccggcccgctggataaaactccggcgcgcctgcggttggaaggttatcgggcggcgatgaaacgtgcgggtctcaacattcctgatggctatgaagtcactggtgattttgaatttaacggcgggtttgacgctatgcgccaactgctatcacatccgctgcgtcctcaggccgtctttaccggaaatgacgctatggctgttggcgtttaccaggcgttatatcaggcagagttacaggttccgcaggatatcgcggtgattggctatgacgatatcgaactggcaagctttatgacgccaccattaaccactatccaccaaccgaaagatgaactgggggagctggcgattgatgtactcatccatcggataacccagccgacccttcagcaacaacgattacaacttactccgattctgatggaacgcggttcggcttagctggtgaaaagaaaaaccaccctggcgcccaatacgcaaaccgcctctccccgcgcgttggccgattcattaatgcagctggcacgacaggtttcccgactggaaagcgggcagtgagctttcctcggtaccaaattccagaaaagaggcctcccgaaaggggggccttttttcgttttggtcctacttgtgcctgttctatttccatcccggttcctggccttttgctggccttttgctcacatgttctttcctgcgttatcccctgattctgtggataaccgtattaccgcctttgagtgagctgatacccgatacttgtgcctgttctatttccgaaccgaccgcttgtatgaatccatcaaaattcgttttctctatgttggattccttgttgctcatattgtgatgataatttctacaaatatagtcattggtaactatctatgaaactgtttgatacttttatagttgattaaacttgttcatggcatttgccttaatatcatccgctatgtcaatgtagggtttcatagctttgtagtcgctgtgtcccgtccatttcatgaccacctgtgccgggattccgagagccagcgcattgcagatgaatgtccttcttcctgcatgggtactgagcaaagcgtatttgggtgtgacttcatcaatacgttcatttcccttgtagtaggtttcccgtacaggctcgttgatttctgccagttcgcccagctctttcaggtaatcgttcatcttctggttgctgatgacgggcagagccatgtaattctcgaaatggatgtccttgtatttgtccagtatggctttgctgtatttgttcagttcaatcgtcaggctgtcggcagtcttgactgtggttatttcgatgtggtcggacttcacatcgcttcttttcagattgcgaacatccgaataccgcaaactcgtaaagcagcagaacaggaaaacatcacgcacacgttccaggtattgcttatccttgggtatctggtagtctttcagcttgttcagttcatcccaagtcaggaagattacttttttcgaggtggttttcagtttcggtttgaacgtatcgtatgcaatgttctgatgatgtcctttcctgaagctccagcgcaggaaccatttgaggaatcccatttgcttgccgatggtgctgtttctcatatccttggtgtcacgcaggaagttgacgtattcgttcaatccaaactcgttgaaatagttgaacgttgcatcctccttgaactctttgaggtggttcctcactgctgcaaatttttcataggtggatgccgtccagttattctggttaccgcactcttttacaaactcatcgaacacctcccaaaagctgacaggggcttcttccggctgttcttcactggtgtctttcattctcatgttgaaagcttccttcaactgttgggtcgttggcatgacctcctgcacctcaaattccttgaaaatattctggatttcggcatagtatttcagcaagtccgtattgatttcggctgcactttgctttagcttgttggtacatccgttctttacccgctgcttatctacatcccatttggctacgtcaatccggtagcccgttgtaaactcgatacgttggctggcaaagatgacacgcatacggatgggtacgttctctacgattggcacaccgttctttttccggctctccaatgcaaaaatgatgttgcgcttgatattcataattgggtgcgtttgaaattctacacccaaatatacacccaattattgagatagcaaaagacatttagaaacatttacttttactctatattgtaatttacacttgattatcagtcgtttgcagttttatgatattctgtgaaagtataagttcgagagcctgtctctccgcaaaaaacgctgaaaatcagcagattgcaaaacaaacaccctgttttacacccaagaatgtaaagtcggctgtttttgttttatttaagataatacaaccactacataataaaagagtagcgatattaaaagaatccgatgagaaaagactaatatttatctatccattcagtttgatttttcaggactttacatcgtcctgaaagtatttgttggtaccggtaccgaggacgcgtaaacatttacagttgcatgtggcctattgtttttagccgttaaatattttataactattaaatagcgatacaaattgttcgaaactaatattgtttatatcatatattctcgcatgttttaaagctttattaaattgattttttgtaaacagtttttcgtactctttgttaacccatttcattacaaaagtttcatatttttttctctctttaaatgccatttttgctggctttctttttaatacaattaatgtgctatccactttaggttttggatggaaataatacctaggaatttttgctaatatagaaatatctacctctgccattaacagcaatgctagtgatctgtttgtatctaataacattttagcaaaaccatattccactattaaataacttattgtggctgaactttcaaaaacaatttttcgaattatatttgtgcttatgttgtaaggtatgctgccaaatattttatatggattgtggctaggaaatgtaaatttcagtatatcatcatttactatttgatagttaggataatttaagagcttattacgagttacctcacataatttagaatcaatttctatcgccgttacaaaattacatctctttaccaatccagcagtaaaatgacctttccctgcacctatttcaaagatgttatctttttcatctaaacttatgcaattcattattttttctatgtgatattttgaagtaataaaattttgactatcttttatatttactttgttcattataacctctccttaatttattgcatctcttttcgaatatttatgttttttgagaaaagaacgtactcatggttcatcccgatatgcgtatcggtctgtatatcagcaactttctatgtgtttcaactacaatagtcatctattctcatctttctgagtccaccccctgcaaagcccctctttacgacataaaaattcggtcggaaaaggtatgcaaaagatgtttctctctttaagagaaactcttcgggatgcaaaaatatgaaaataactccaattcaccaaattatatagcgacttttttacaaaatgctaaaatttgttgatttccgtcaagcaattgttgagcaaaaatgtcttttacgataaaatgatacctcaatatcaactgtttagcaaaacgatatttctcttaaagagagaaacacctttttgttcaccaatccccgacttttaatcccgcggccatgattgaaaaaggaagagtatgagtattcaacatttccgtgtcgcccttattcccttttttgcggcattttgccttcctgtttttgctcacccagaaacgctggtgaaagtaaaagatgctgaagatcagttgggtgcacgagtgggttacatcgaactggatctcaacagcggtaagatccttgagagttttcgccccgaagaacgttttccaatgatgagcacttttaaagttctgctatgtggcgcggtattatcccgtattgacgccgggcaagagcaactcggtcgccgcatacactattctcagaatgacttggttgagtactcaccagtcacagaaaagcatcttacggatggcatgacagtaagagaattatgcagtgctgccataaccatgagtgataacactgcggccaacttacttctgacaacgatcggaggaccgaaggagctaaccgcttttttgcacaacatgggggatcatgtaactcgccttgatcgttgggaaccggagctgaatgaagccataccaaacgacgagcgtgacaccacgatgcctgtagcaatggcaacaacgttgcgcaaactattaactggcgaactacttactctagcttcccggcaacaattaatagactggatggaggcggataaagttgcaggaccacttctgcgctcggcccttccggctggctggtttattgctgataaatctggagccggtgagcgtgggtctcgcggtatcattgcagcactggggccagatggtaagccctcccgtatcgtagttatctacacgacggggagtcaggcaactatggatgaacgaaatagacagatcgctgagataggtgcctcactgattaagcattggtaactgtcagaccaagtttactcataacgcgtcaattcgagggggatcaattccgtgataggtgggctgcccttcctggttggcttggtttcatcagccatccgcttgccctcatctgttacgccggcggtagccggccagcctcgcagagcaggattcccgttgagcaccgccaggtgcgaataagggacagtgaagaaggaacacccgctcgcgggtgggcctacttcacctatcctgcccggctgacgccgttggatacaccaaggaaagtctacacgaaccctttggcaaaatcctgtatatcgtgcgaaaaaggatggatataccgaaaaaatcgctataatgaccccgaagcagggttatgcagcggaaaacggaattgatccggccacgatgcgtccggcgtagaggatctgaagatcagcagttcaacctgttgatagtacgtactaagctctcatgtttcacgtactaagctctcatgtttaacgtactaagctctcatgtttaacgaactaaaccctcatggctaacgtactaagctctcatggctaacgtactaagctctcatgtttcacgtactaagctctcatgtttgaacaataaaattaatataaatcagcaacttaaatagcctctaaggttttaagttttataagaaaaaaaagaatatataaggcttttaaagcttttaag

SEQ ID NO: 60 - DNA, 8631 bp, synthetic construct
  misc_feature 1..8631: note = Description of sequence: pBH210
  source 1..8631: mol_type = other DNA
gtttaacggttgtggacaacaagccagggatgtaacgcactgagaagcccttagagcctctcaaagcaattttgagtgacacaggaacacttaacggctgacatgggaattcccctccaccgcggtggccctgtacaaagaaaattcgacaaactgttatttttctatctatttatttgaattgtgagcggataacaattacctttgtcggcaattgtgagcggataacaattaaataaagatattctcgtcaaacaaatataaataatataaacatggtttttactctggaagattttgttggcgattggcgtcagaccgcgggttataatttggatcaagtcctggaacagggtggcgtaagctctctgttccagaacctgggtgtgagcgtgacgccgattcagcgcatcgttctgtccggcgagaacggtctgaaaattgatattcatgtgatcatcccgtacgaaggcctgagcggtgaccaaatgggtcaaatcgagaaaatctttaaagtcgtctacccagttgacgatcaccacttcaaggttatcttgcattacggtacgctggtgattgatggtgtgaccccgaatatgattgactatttcggccgtccgtatgaaggcattgccgtttttgacggtaaaaagatcaccgtcaccggtaccctgtggaatggcaataagattattgacgagcgtctgattaacccggacggcagcctgctgttccgcgtgaccatcaacggtgtcacgggttggcgtctgtgcgagcgcatcctggcataatgaactgcacttgctttgataattaatgataaacaatctaaaagcactctaatcgttatcggagtgcttttagattactaatcaaattgcttctactaattgcctatcttccagtgatggaacagcatttgaacgcattggctgcaacaatcagccttgatctggaagaagcaatgaaagctgctgttaagtctccgaatcaggtattgttcctgacaggtgtattcccatccggtaaacgcggatactttgcagttgatctgactcaggaataaattataaattaaggtaagaagattgtaggataagctaatgaaatagaaaaaggatgccgtcacacaacttgtcggcattcttttttgttttattagttgaaaatatagtgaaaaagttgcctaaatatgtatgttaacaaattatttgtcgtaactttgcactccaaatctgtttttaacatatggcactagtgaaaccagtaacgttatacgatgtcgcagagtatgccggtgtctcttatcagaccgtttcccgcgtggtgaaccaggccagccacgtttctgcgaaaacgcgggaaaaagtggaagcggcgatggcggagctgaattacattcccaaccgcgtggcacaacaactggcgggcaaacagtcgttgctgattggcgttgccacctccagtctggccctgcacgcgctgtcgcaaattgtcgcggcgattaaatctcgcgcctatcaactgggtgccagcgtgttcgtgtcgatggtagaacgaagcggcatcgaagcctgtaaaacggcggtgcacaatcttctcgcgcaacgcgtcagtgggctgatcattaactatccgctggataaccaggatgccattgctgtggaagctgcctgcactaatgttccggcgttatttcttgatgtctctgaccagacacccatcaacagtattattttctcccatgaagacggtacgcgactgggcgtggagcatctggtcgcattgggtcaccagcaaatcgcgctgttagcgggcccattaagttctgtctcggcgcgtctgcgtctggctggctggcataaatatctcactcgcaatcaaattcagccgatagcggaacgggaaggcgactggagtgccatgtccggttttcaacaaaccatgcaaatgctgaatgagggcatcgttcccactgcgatgctggttgccaacgatcagatggcgctgggcgcaatgcgcgccattaccgagaccgggctgcgcgttggtgcggatatctcggtagtgggatacgacgataccgaagacagctcatgttatatcccgccgttaaccaccatcaaacaggattttcgcctgctggggcaaaccagcgtggaccgcttgctgcaactctctcagggccaggcggtgaagggcaatcagctgttgcccgtctcactggtgaaaagaaaaaccaccctggcgcccaatacgcaaaccgcctctccccgcgcgttggccgattcattaatgcagctggcacgacaggtttcccgactggaaagcgggcagtgagtgcaacaatcagccttgatctggaagaagcaatgaaagctgctgttaagtctccgaatcaggtattgttcctgacaggtgtattcccatccggtaaacgcggatactttgcagttgatctgactcaggaataaattataaattaaggtaagaagattgtaggataagctaatgaaatagaaaaaggatgccgtcacacaacttgtcggcattcttttttgttttattagttgaaaatatagtgaaaaagttgcctaaatatgtatgttaacaaattatttgtcgtaactttgcactccaaatctgtttttaacatatggcactagtgaaaccagtaacgttatacgatgtcgcagagtatgccggtgtctcttatcagaccgtttcccgcgtggtgaaccaggccagccacgtttctgcgaaaacgcgggaaaaagtggaagcggcgatggcggagctcaattacattcccaaccgcgtggcacaacaactggcgggcaaagcgtcgcataccattggcatgttgatcactgccagtaccaatcctttctattcagaactggtgcgtggcgttgaacgcagctgcttcgaacgcggttatagtctcgtcctttgcaataccgaaggcgatgaacagcggatgaatcgcaatctggaaacgctgatgcaaaaacgcgttgatggcttgctgttactgtgcaccgaaacgcatcaaccttcgcgtgaaatcatgcaacgttatccgacagtgcctactgtgatgatggactgggctccgttcgatggcgacagcgatcttattcaggataactcgttgctgggcggagacttagcaacgcaatatctgatcgataaaggtcatacccgtatcgcctgtattaccggcccgctggataaaactccggcgcgcctgcggttggaaggttatcgggcggcgatgaaacgtgcgggtctcaacattcctgatggctatgaagtcactggtgattttgaatttaacggcgggtttgacgctatgcgccaactgctatcacatccgctgcgtcctcaggccgtctttaccggaaatgacgctatggctgttggcgtttaccaggcgttatatcaggcagagttacaggttccgcaggatatcgcggtgattggctatgacgatatcgaactggcaagctttatgacgccaccattaaccactatccaccaaccgaaagatgaactgggggagctggcgattgatgtactcatccatcggataacccagccgacccttcagcaacaacgattacaacttactccgattctgatggaacgcggttcggcttagctggtgaaaagaaaaaccaccctggcgcccaatacgcaaaccgcctctccccgcgcgttggccgattcattaatgcagctggcacgacaggtttcccgactggaaagcgggcagtgagctttcctcggtaccaaattccagaaaagaggcctcccgaaaggggggccttttttcgttttggtcctacttgtgcctgttctatttccatcccggttcctggccttttgctggccttttgctcacatgttctttcctgcgttatcccctgattctgtggataaccgtattaccgcctttgagtgagctgatacccgatacttgtgcctgttctatttccgaaccgaccgcttgtatgaatccatcaaaattcgttttctctatgttggattccttgttgctcatattgtgatgataatttctacaaatatagtcattggtaactatctatgaaactgtttgatacttttatagttgattaaacttgttcatggcatttgccttaatatcatccgctatgtcaatgtagggtttcatagctttgtagtcgctgtgtcccgtccatttcatgaccacctgtgccgggattccgagagccagcgcattgcagatgaatgtccttcttcctgcatgggtactgagcaaagcgtatttgggtgtgacttcatcaatacgttcatttcccttgtagtaggtttcccgtacaggctcgttgatttctgccagttcgcccagctctttcaggtaatcgttcatcttctggttgctgatgacgggcagagccatgtaattctcgaaatggatgtccttgtatttgtccagtatggctttgctgtatttgttcagttcaatcgtcaggctgtcggcagtcttgactgtggttatttcgatgtggtcggacttcacatcgcttcttttcagattgcgaacatccgaataccgcaaactcgtaaagcagcagaacaggaaaacatcacgcacacgttccaggtattgcttatccttgggtatctggtagtctttcagcttgttcagttcatcccaagtcaggaagattacttttttcgaggtggttttcagtttcggtttgaacgtatcgtatgcaatgttctgatgatgtcctttcctgaagctccagcgcaggaaccatttgaggaatcccatttgcttgccgatggtgctgtttctcatatccttggtgtcacgcaggaagttgacgtattcgttcaatccaaactcgttgaaatagttgaacgttgcatcctccttgaactctttgaggtggttcctcactgctgcaaatttttcataggtggatgccgtccagttattctggttaccgcactcttttacaaactcatcgaacacctcccaaaagctgacaggggcttcttccggctgttcttcactggtgtctttcattctcatgttgaaagcttccttcaactgttgggtcgttggcatgacctcctgcacctcaaattccttgaaaatattctggatttcggcatagtatttcagcaagtccgtattgatttcggctgcactttgctttagcttgttggtacatccgttctttacccgctgcttatctacatcccatttggctacgtcaatccggtagcccgttgtaaactcgatacgttggctggcaaagatgacacgcatacggatgggtacgttctctacgattggcacaccgttctttttccggctctccaatgcaaaaatgatgttgcgcttgatattcataattgggtgcgtttgaaattctacacccaaatatacacccaattattgagatagcaaaagacatttagaaacatttacttttactctatattgtaatttacacttgattatcagtcgtttgcagttttatgatattctgtgaaagtataagttcgagagcctgtctctccgcaaaaaacgctgaaaatcagcagattgcaaaacaaacaccctgttttacacccaagaatgtaaagtcggctgtttttgttttatttaagataatacaaccactacataataaaagagtagcgatattaaaagaatccgatgagaaaagactaatatttatctatccattcagtttgatttttcaggactttacatcgtcctgaaagtatttgttggtaccggtaccgaggacgcgtaaacatttacagttgcatgtggcctattgtttttagccgttaaatattttataactattaaatagcgatacaaattgttcgaaactaatattgtttatatcatatattctcgcatgttttaaagctttattaaattgattttttgtaaacagtttttcgtactctttgttaacccatttcattacaaaagtttcatatttttttctctctttaaatgccatttttgctggctttctttttaatacaattaatgtgctatccactttaggttttggatggaaataatacctaggaatttttgctaatatagaaatatctacctctgccattaacagcaatgctagtgatctgtttgtatctaataacattttagcaaaaccatattccactattaaataacttattgtggctgaactttcaaaaacaatttttcgaattatatttgtgcttatgttgtaaggtatgctgccaaatattttatatggattgtggctaggaaatgtaaatttcagtatatcatcatttactatttgatagttaggataatttaagagcttattacgagttacctcacataatttagaatcaatttctatcgccgttacaaaattacatctctttaccaatccagcagtaaaatgacctttccctgcacctatttcaaagatgttatctttttcatctaaacttatgcaattcattattttttctatgtgatattttgaagtaataaaattttgactatcttttatatttactttgttcattataacctctccttaatttattgcatctcttttcgaatatttatgttttttgagaaaagaacgtactcatggttcatcccgatatgcgtatcggtctgtatatcagcaactttctatgtgtttcaactacaatagtcatctattctcatctttctgagtccaccccctgcaaagcccctctttacgacataaaaattcggtcggaaaaggtatgcaaaagatgtttctctctttaagagaaactcttcgggatgcaaaaatatgaaaataactccaattcaccaaattatatagcgacttttttacaaaatgctaaaatttgttgatttccgtcaagcaattgttgagcaaaaatgtcttttacgataaaatgatacctcaatatcaactgtttagcaaaacgatatttctcttaaagagagaaacacctttttgttcaccaatccccgacttttaatcccgcggccatgattgaaaaaggaagagtatgagtattcaacatttccgtgtcgcccttattcccttttttgcggcattttgccttcctgtttttgctcacccagaaacgctggtgaaagtaaaagatgctgaagatcagttgggtgcacgagtgggttacatcgaactggatctcaacagcggtaagatccttgagagttttcgccccgaagaacgttttccaatgatgagcacttttaaagttctgctatgtggcgcggtattatcccgtattgacgccgggcaagagcaactcggtcgccgcatacactattctcagaatgacttggttgagtactcaccagtcacagaaaagcatcttacggatggcatgacagtaagagaattatgcagtgctgccataaccatgagtgataacactgcggccaacttacttctgacaacgatcggaggaccgaaggagctaaccgcttttttgcacaacatgggggatcatgtaactcgccttgatcgttgggaaccggagctgaatgaagccataccaaacgacgagcgtgacaccacgatgcctgtagcaatggcaacaacgttgcgcaaactattaactggcgaactacttactctagcttcccggcaacaattaatagactggatggaggcggataaagttgcaggaccacttctgcgctcggcccttccggctggctggtttattgctgataaatctggagccggtgagcgtgggtctcgcggtatcattgcagcactggggccagatggtaagccctcccgtatcgtagttatctacacgacggggagtcaggcaactatggatgaacgaaatagacagatcgctgagataggtgcctcactgattaagcattggtaactgtcagaccaagtttactcataacgcgtcaattcgagggggatcaattccgtgataggtgggctgcccttcctggttggcttggtttcatcagccatccgcttgccctcatctgttacgccggcggtagccggccagcctcgcagagcaggattcccgttgagcaccgccaggtgcgaataagggacagtgaagaaggaacacccgctcgcgggtgggcctacttcacctatcctgcccggctgacgccgttggatacaccaaggaaagtctacacgaaccctttggcaaaatcctgtatatcgtgcgaaaaaggatggatataccgaaaaaatcgctataatgaccccgaagcagggttatgcagcggaaaacggaattgatccggccacgatgcgtccggcgtagaggatctgaagatcagcagttcaacctgttgatagtacgtactaagctctcatgtttcacgtactaagctctcatgtttaacgtactaagctctcatgtttaacgaactaaaccctcatggctaacgtactaagctctcatggctaacgtactaagctctcatgtttcacgtactaagctctcatgtttgaacaataaaattaatataaatcagcaacttaaatagcctctaaggttttaagttttataagaaaaaaaagaatatataaggcttttaaagcttttaag

SEQ ID NO: 61 - DNA, 8630 bp, synthetic construct
  misc_feature 1..8630: note = Description of sequence: pBH211
  source 1..8630: mol_type = other DNA
gtttaacggttgtggacaacaagccagggatgtaacgcactgagaagcccttagagcctctcaaagcaattttgagtgacacaggaacacttaacggctgacatgggaattcccctccaccgcggtggccctgtacaaagaaaattcgacaaactgttatttttctatctatttatttgaattttaagcgcttaaaatttacctttgtcggcaattttaagcgcttaaaattaaataaagatattctcgtcaaacaaatataaataatataaacatggtttttactctggaagattttgttggcgattggcgtcagaccgcgggttataatttggatcaagtcctggaacagggtggcgtaagctctctgttccagaacctgggtgtgagcgtgacgccgattcagcgcatcgttctgtccggcgagaacggtctgaaaattgatattcatgtgatcatcccgtacgaaggcctgagcggtgaccaaatgggtcaaatcgagaaaatctttaaagtcgtctacccagttgacgatcaccacttcaaggttatcttgcattacggtacgctggtgattgatggtgtgaccccgaatatgattgactatttcggccgtccgtatgaaggcattgccgtttttgacggtaaaaagatcaccgtcaccggtaccctgtggaatggcaataagattattgacgagcgtctgattaacccggacggcagcctgctgttccgcgtgaccatcaacggtgtcacgggttggcgtctgtgcgagcgcatcctggcataatgaactgcacttgctttgataattaatgataaacaatctaaaagcactctaatcgttatcggagtgcttttagattactaatcaaattgcttctactaattgcctatcttccagtgatggaacagcatttgaacgcattggctgcaacaatcagccttgatctggaagaagcaatgaaagctgctgttaagtctccgaatcaggtattgttcctgacaggtgtattcccatccggtaaacgcggatactttgcagttgatctgactcaggaataaattataaattaaggtaagaagattgtaggataagctaatgaaatagaaaaaggatgccgtcacacaacttgtcggcattcttttttgttttattagttgaaaatatagtgaaaaagttgcctaaatatgtatgttaacaaattatttgtcgtaactttgcactccaaatctgtttttaacatatggcactagtgaaaccagtaacgttatacgatgtcgcagagtatgccggtgtctctaccgcgaccgtttccaacgtggtgaaccaggccagccacgtttctgcgaaaacgcgggaaaaagtggaagcggcgatggcggagctgaattacattcccaaccgcgtggcacaacaactggcgggcaaacagtcgttgctgattggcgttgccacctccagtctggccctgcacgcgctgtcgcaaattgtcgcggcgattaaatctcgcgcctatcaactgggtgccagcgtgttcgtgtcgatggtagaacgaagcggcatcgaagcctgtaaaacggcggtgcacaatcttctcgcgcaacgcgtcagtgggctgatcattaactatccgctggataaccaggatgccattgctgtggaagctgcctgcactaatgttccggcgttatttcttgatgtctctgaccagacacccatcaacagtattattttctcccatgaagacggtacgcgactgggcgtggagcatctggtcgcattgggtcaccagcaaatcgcgctgttagcgggcccattaagttctgtctcggcgcgtctgcgtctggctggctggcataaatatctcactcgcaatcaaattcagccgatagcggaacgggaaggcgactggagtgccatgtccggttttcaacaaaccatgcaaatgctgaatgagggcatcgttcccactgcgatgctggttgccaacgatcagatggcgctgggcgcaatgcgcgccattaccgagaccgggctgcgcgttggtgcggatatctcggtagtgggatacgacgataccgaagacagctcatgttatatcccgccgttaaccaccatcaaacaggattttcgcctgctggggcaaaccagcgtggaccgcttgctgcaactctctcagggccaggcggtgaagggcaatcagctgttgcccgtctcactggtgaaaagaaaaaccaccctggcgcccaatacgcaaaccgcctctccccgcgcgttggccgattcattaatgcagctggcacgacaggtttcccgactggaaagcgggcagtgagtgcaacaatcagccttgatctggaagaagcaatgaaagctgctgttaagtctccgaatcaggtattgttcctgacaggtgtattcccatccggtaaacgcggatactttgcagttgatctgactcaggaataaattataaattaaggtaagaagattgtaggataagctaatgaaatagaaaaaggatgccgtcacacaacttgtcggcattcttttttgttttattagttgaaaatatagtgaaaaagttgcctaaatatgtatgttaacaaattatttgtcgtaactttgcactccaaatctgtttttaacatatggcactagtgaaaccagtaacgttatacgatgtcgcagagtatgccggtgtctctaccgcgaccgtttccaacgtggtgaaccaggccagccacgtttctgcgaaaacgcgggaaaaagtggaagcggcgatggcggagctcaattacattcccaaccgcgtggcacaacaactggcgggcaaagcgtcgcataccattggcatgttgatcactgccagtaccaatcctttctattcagaactggtgcgtggcgttgaacgcagctgcttcgaacgcggttatagtctcgtcctttgcaataccgaaggcgatgaacagcggatgaatcgcaatctggaaacgctgatgcaaaaacgcgttgatggcttgctgttactgtgcaccgaaacgcatcaaccttcgcgtgaaatcatgcaacgttatccgacagtgcctactgtgatgatggactgggctccgttcgatggcgacagcgatcttattcaggataactcgttgctgggcggagacttagcaacgcaatatctgatcgataaaggtcatacccgtatcgcctgtattaccggcccgctggataaaactccggcgcgcctgcggttggaaggttatcgggcggcgatgaaacgtgcgggtctcaacattcctgatggctatgaagtcactggtgattttgaatttaacggcgggtttgacgctatgcgccaactgctatcacatccgctgcgtcctcaggccgtctttaccggaaatgacgctatggctgttggcgtttaccaggcgttatatcaggcagagttacaggttccgcaggatatcgcggtgattggctatgacgatatcgaactggcaagctttatgacgccaccattaaccactatccaccaaccgaaagatgaactgggggagctggcgattgatgtactcatccatcggataacccagccgacccttcagcaacaacgattacaacttactccgattctgatggaacgcggttcggcttagctggtgaaaagaaaaaccaccctggcgcccaatacgcaaaccgcctctccccgcgcgttggccgattcattaatgcagctggcacgacaggtttcccgactggaaagcgggcagtgagctttcctcggtaccaaattccagaaaagaggcctcccgaaaggggggccttttttcgttttggtcctacttgtgcctgttctatttccatcccggttcctggccttttgctggccttttgctcacatgttctttcctgcgttatcccctgattctgtggataaccgtattaccgcctttgagtgagctgatacccgatacttgtgcctgttctatttccgaaccgaccgcttgtatgaatccatcaaaattcgttttctctatgttggattccttgttgctcatattgtgatgataatttctacaaatatagtcattggtaactatctatgaaactgtttgatacttttatagttgattaaacttgttcatggcatttgccttaatatcatccgctatgtcaatgtagggtttcatagctttgtagtcgctgtgtcccgtccatttcatgaccacctgtgccgggattccgagagccagcgcattgcagatgaatgtccttcttcctgcatgggtactgagcaaagcgtatttgggtgtgacttcatcaatacgttcatttcccttgtagtaggtttcccgtacaggctcgttgatttctgccagttcgcccagctctttcaggtaatcgttcatcttctggttgctgatgacgggcagagccatgtaattctcgaaatggatgtccttgtatttgtccagtatggctttgctgtatttgttcagttcaatcgtcaggctgtcggcagtcttgactgtggttatttcgatgtggtcggacttcacatcgcttcttttcagattgcgaacatccgaataccgcaaactcgtaaagcagcagaacaggaaaacatcacgcacacgttccaggtattgcttatccttgggtatctggtagtctttcagcttgttcagttcatcccaagtcaggaagattacttttttcgaggtggttttcagtttcggtttgaacgtatcgtatgcaatgttctgatgatgtcctttcctgaagctccagcgcaggaaccatttgaggaatcccatttgcttgccgatggtgctgtttctcatatccttggtgtcacgcaggaagttgacgtattcgttcaatccaaactcgttgaaatagttgaacgttgcatcctccttgaactctttgaggtggttcctcactgctgcaaatttttcataggtggatgccgtccagttattctggttaccgcactcttttacaaactcatcgaacacctcccaaaagctgacaggggcttcttccggctgttcttcactggtgtctttcattctcatgttgaaagcttccttcaactgttgggtcgttggcatgacctcctgcacctcaaattccttgaaaatattctggatttcggcatagtatttcagcaagtccgtattgatttcggctgcactttgctttagcttgttggtacatccgttctttacccgctgcttatctacatcccatttggctacgtcaatccggtagcccgttgtaaactcgatacgttggctggcaaagatgacacgcatacggatgggtacgttctctacgattggcacaccgttctttttccggctctccaatgcaaaaatgatgttgcgcttgatattcataattgggtgcgtttgaaattctacacccaaatatacacccaattattgagatagcaaaagacatttagaaacatttacttttactctatattgtaatttacacttgattatcagtcgtttgcagttttatgatattctgtgaaagtataagttcgagagcctgtctctccgcaaaaaacgctgaaaatcagcagattgcaaaacaaacaccctgttttacacccaagaatgtaaagtcggctgtttttgttttatttaagataatacaaccactacataataaaagagtagcgatattaaaagaatccgatgagaaaagactaatatttatctatccattcagtttgatttttcaggactttacatcgtcctgaaagtatttgttggtaccggtaccgaggacgcgtaaacatttacagttgcatgtggcctattgtttttagccgttaaatattttataactattaaatagcgatacaaattgttcgaaactaatattgtttatatcatatattctcgcatgttttaaagctttattaaattgattttttgtaaacagtttttcgtactctttgttaacccatttcattacaaaagtttcatatttttttctctctttaaatgccatttttgctggctttctttttaatacaattaatgtgctatccactttaggttttggatggaaataatacctaggaatttttgctaatatagaaatatctacctctgccattaacagcaatgctagtgatctgtttgtatctaataacattttagcaaaaccatattccactattaaataacttattgtggctgaactttcaaaaacaatttttcgaattatatttgtgcttatgttgtaaggtatgctgccaaatattttatatggattgtggctaggaaatgtaaatttcagtatatcatcatttactatttgatagttaggataatttaagagcttattacgagttacctcacataatttagaatcaatttctatcgccgttacaaaattacatctctttaccaatccagcagtaaaatgacctttccctgcacctatttcaaagatgttatctttttcatctaaacttatgcaattcattattttttctatgtgatattttgaagtaataaaattttgactatcttttatatttactttgttcattataacctctccttaatttattgcatctcttttcgaatatttatgttttttgagaaaagaacgtactcatggttcatcccgatatgcgtatcggtctgtatatcagcaactttctatgtgtttcaactacaatagtcatctattctcatctttctgagtccaccccctgcaaagcccctctttacgacataaaaattcggtcggaaaaggtatgcaaaagatgtttctctctttaagagaaactcttcgggatgcaaaaatatgaaaataactccaattcaccaaattatatagcgacttttttacaaaatgctaaaatttgttgatttccgtcaagcaattgttgagcaaaaatgtcttttacgataaaatgatacctcaatatcaactgtttagcaaaacgatatttctcttaaagagagaaacacctttttgttcaccaatccccgacttttaatcccgcggccatgattgaaaaaggaagagtatgagtattcaacatttccgtgtcgcccttattcccttttttgcggcattttgccttcctgtttttgctcacccagaaacgctggtgaaagtaaaagatgctgaagatcagttgggtgcacgagtgggttacatcgaactggatctcaacagcggtaagatccttgagagttttcgccccgaagaacgttttccaatgatgagcacttttaaagttctgctatgtggcgcggtattatcccgtattgacgccgggcaagagcaactcggtcgccgcatacactattctcagaatgacttggttgagtactcaccagtcacagaaaagcatcttacggatggcatgacagtaagagaattatgcagtgctgccataaccatgagtgataacactgcggccaacttacttctgacaacgatcggaggaccgaaggagctaaccgcttttttgcacaacatgggggatcatgtaactcgccttgatcgttgggaaccggagctgaatgaagccataccaaacgacgagcgtgacaccacgatgcctgtagcaatggcaacaacgttgcgcaaactattaactggcgaactacttactctagcttcccggcaacaattaatagactggatggaggcggataaagttgcaggaccacttctgcgctcggcccttccggctggctggtttattgctgataaatctggagccggtgagcgtgggtctcgcggtatcattgcagcactggggccagatggtaagccctcccgtatcgtagttatctacacgacggggagtcaggcaactatggatgaacgaaatagacagatcgctgagataggtgcctcactgattaagcattggtaactgtcagaccaagtttactcataacgcgtcaattcgagggggatcaattccgtgataggtgggctgcccttcctggttggcttggtttcatcagccatccgcttgccctcatctgttacgccggcggtagccggccagcctcgcagagcaggattcccgttgagcaccgccaggtgcgaataagggacagtgaagaaggaacacccgctcgcgggtgggcctacttcacctatcctgcccggctgacgccgttggatacaccaaggaaagtctacacgaaccctttggcaaaatcctgtatatcgtgcgaaaaaggatggatataccgaaaaaatcgctataatgaccccgaagcagggttatgcagcggaaaacggaattgatccggccacgatgcgtccggcgtagaggatctgaagatcagcagttcaacctgttgatagtacgtactaagctctcatgtttcacgtactaagctctcatgtttaacgtactaagctctcatgtttaacgaactaaaccctcatggctaacgtactaagctctcatggctaacgtactaagctctcatgtttcacgtactaagctctcatgtttgaacaataaaattaatataaatcagcaacttaaatagcctctaaggttttaagttttataagaaaaaaaagaatatataaggcttttaaagcttttaag

SEQ ID NO: 62 - DNA, 8630 bp, synthetic construct
  misc_feature 1..8630: note = Description of sequence: pBH212
  source 1..8630: mol_type = other DNA
gtttaacggttgtggacaacaagccagggatgtaacgcactgagaagcccttagagcctctcaaagcaattttgagtgacacaggaacacttaacggctgacatgggaattcccctccaccgcggtggccctgtacaaagaaaattcgacaaactgttatttttctatctatttatttgaattaggagcgctcctaatttacctttgtcggcaattaggagcgctcctaattaaataaagatattctcgtcaaacaaatataaataatataaacatggtttttactctggaagattttgttggcgattggcgtcagaccgcgggttataatttggatcaagtcctggaacagggtggcgtaagctctctgttccagaacctgggtgtgagcgtgacgccgattcagcgcatcgttctgtccggcgagaacggtctgaaaattgatattcatgtgatcatcccgtacgaaggcctgagcggtgaccaaatgggtcaaatcgagaaaatctttaaagtcgtctacccagttgacgatcaccacttcaaggttatcttgcattacggtacgctggtgattgatggtgtgaccccgaatatgattgactatttcggccgtccgtatgaaggcattgccgtttttgacggtaaaaagatcaccgtcaccggtaccctgtggaatggcaataagattattgacgagcgtctgattaacccggacggcagcctgctgttccgcgtgaccatcaacggtgtcacgggttggcgtctgtgcgagcgcatcctggcataatgaactgcacttgctttgataattaatgataaacaatctaaaagcactctaatcgttatcggagtgcttttagattactaatcaaattgcttctactaattgcctatcttccagtgatggaacagcatttgaacgcattggctgcaacaatcagccttgatctggaagaagcaatgaaagctgctgttaagtctccgaatcaggtattgttcctgacaggtgtattcccatccggtaaacgcggatactttgcagttgatctgactcaggaataaattataaattaaggtaagaagattgtaggataagctaatgaaatagaaaaaggatgccgtcacacaacttgtcggcattcttttttgttttattagttgaaaatatagtgaaaaagttgcctaaatatgtatgttaacaaattatttgtcgtaactttgcactccaaatctgtttttaacatatggcactagtgaaaccagtaacgttatacgatgtcgcagagtatgccggtgtctctaaaagcaccgtttccctggtggtgaaccaggccagccacgtttctgcgaaaacgcgggaaaaagtggaagcggcgatggcggagctgaattacattcccaaccgcgtggcacaacaactggcgggcaaacagtcgttgctgattggcgttgccacctccagtctggccctgcacgcgctgtcgcaaattgtcgcggcgattaaatctcgcgcctatcaactgggtgccagcgtgttcgtgtcgatggtagaacgaagcggcatcgaagcctgtaaaacggcggtgcacaatcttctcgcgcaacgcgtcagtgggctgatcattaactatccgctggataaccaggatgccattgctgtggaagctgcctgcactaatgttccggcgttatttcttgatgtctctgaccagacacccatcaacagtattattttctcccatgaagacggtacgcgactgggcgtggagcatctggtcgcattgggtcaccagcaaatcgcgctgttagcgggcccattaagttctgtctcggcgcgtctgcgtctggctggctggcataaatatctcactcgcaatcaaattcagccgatagcggaacgggaaggcgactggagtgccatgtccggttttcaacaaaccatgcaaatgctgaatgagggcatcgttcccactgcgatgctggttgccaacgatcagatggcgctgggcgcaatgcgcgccattaccgagaccgggctgcgcgttggtgcggatatctcggtagtgggatacgacgataccgaagacagctcatgttatatcccgccgttaaccaccatcaaacaggattttcgcctgctggggcaaaccagcgtggaccgcttgctgcaactctctcagggccaggcggtgaagggcaatcagctgttgcccgtctcactggtgaaaagaaaaaccaccctggcgcccaatacgcaaaccgcctctccccgcgcgttggccgattcattaatgcagctggcacgacaggtttcccgactggaaagcgggcagtgagtgcaacaatcagccttgatctggaagaagcaatgaaagctgctgttaagtctccgaatcaggtattgttcctgacaggtgtattcccatccggtaaacgcggatactttgcagttgatctgactcaggaataaattataaattaaggtaagaagattgtaggataagctaatgaaatagaaaaaggatgccgtcacacaacttgtcggcattcttttttgttttattagttgaaaatatagtgaaaaagttgcctaaatatgtatgttaacaaattatttgtcgtaactttgcactccaaatctgtttttaacatatggcactagtgaaaccagtaacgttatacgatgtcgcagagtatgccggtgtctctaaaagcaccgtttccctggtggtgaaccaggccagccacgtttctgcgaaaacgcgggaaaaagtggaagcggcgatggcggagctcaattacattcccaaccgcgtggcacaacaactggcgggcaaagcgtcgcataccattggcatgttgatcactgccagtaccaatcctttctattcagaactggtgcgtggcgttgaacgcagctgcttcgaacgcggttatagtctcgtcctttgcaataccgaaggcgatgaacagcggatgaatcgcaatctggaaacgctgatgcaaaaacgcgttgatggcttgctgttactgtgcaccgaaacgcatcaaccttcgcgtgaaatcatgcaacgttatccgacagtgcctactgtgatgatggactgggctccgttcgatggcgacagcgatcttattcaggataactcgttgctgggcggagacttagcaacgcaatatctgatcgataaaggtcatacccgtatcgcctgtattaccggcccgctggataaaactccggcgcgcctgcggttggaaggttatcgggcggcgatgaaacgtgcgggtctcaacattcctgatggctatgaagtcactggtgattttgaatttaacggcgggtttgacgctatgcgccaactgctatcacatccgctgcgtcctcaggccgtctttaccggaaatgacgctatggctgttggcgtttaccaggcgttatatcaggcagagttacaggttccgcaggatatcgcggtgattggctatgacgatatcgaactggcaagctttatgacgccaccattaaccactatccaccaaccgaaagatgaactgggggagctggcgattgatgtactcatccatcggataacccagccgacccttcagcaacaacgattacaacttactccgattctgatggaacgcggttcggcttagctggtgaaaagaaaaaccaccctggcgcccaatacgcaaaccgcctctccccgcgcgttggccgattcattaatgcagctggcacgacaggtttcccgactggaaagcgggcagtgagctttcctcggtaccaaattccagaaaagaggcctcccgaaaggggggccttttttcgttttggtcctacttgtgcctgttctatttccatcccggttcctggccttttgctggccttttgctcacatgttctttcctgcgttatcccctgattctgtggataaccgtattaccgcctttgagtgagctgatacccgatacttgtgcctgttctatttccgaaccgaccgcttgtatgaatccatcaaaattcgttttctctatgttggattccttgttgctcatattgtgatgataatttctacaaatatagtcattggtaactatctatgaaactgtttgatacttttatagttgattaaacttgttcatggcatttgccttaatatcatccgctatgtcaatgtagggtttcatagctttgtagtcgctgtgtcccgtccatttcatgaccacctgtgccgggattccgagagccagcgcattgcagatgaatgtccttcttcctgcatgggtactgagcaaagcgtatttgggtgtgacttcatcaatacgttcatttcccttgtagtaggtttcccgtacaggctcgttgatttctgccagttcgcccagctctttcaggtaatcgttcatcttctggttgctgatgacgggcagagccatgtaattctcgaaatggatgtccttgtatttgtccagtatggctttgctgtatttgttcagttcaatcgtcaggctgtcggcagtcttgactgtggttatttcgatgtggtcggacttcacatcgcttcttttcagattgcgaacatccgaataccgcaaactcgtaaagcagcagaacaggaaaacatcacgcacacgttccaggtattgcttatccttgggtatctggtagtctttcagcttgttcagttcatcccaagtcaggaagattacttttttcgaggtggttttcagtttcggtttgaacgtatcgtatgcaatgttctgatgatgtcctttcctgaagctccagcgcaggaaccatttgaggaatcccatttgcttgccgatggtgctgtttctcatatccttggtgtcacgcaggaagttgacgtattcgttcaatccaaactcgttgaaatagttgaacgttgcatcctccttgaactctttgaggtggttcctcactgctgcaaatttttcataggtggatgccgtccagttattctggttaccgcactcttttacaaactcatcgaacacctcccaaaagctgacaggggcttcttccggctgttcttcactggtgtctttcattctcatgttgaaagcttccttcaactgttgggtcgttggcatgacctcctgcacctcaaattccttgaaaatattctggatttcggcatagtatttcagcaagtccgtattgatttcggctgcactttgctttagcttgttggtacatccgttctttacccgctgcttatctacatcccatttggctacgtcaatccggtagcccgttgtaaactcgatacgttggctggcaaagatgacacgcatacggatgggtacgttctctacgattggcacaccgttctttttccggctctccaatgcaaaaatgatgttgcgcttgatattcataattgggtgcgtttgaaattctacacccaaatatacacccaattattgagatagcaaaagacatttagaaacatttacttttactctatattgtaatttacacttgattatcagtcgtttgcagttttatgatattctgtgaaagtataagttcgagagcctgtctctccgcaaaaaacgctgaaaatcagcagattgcaaaacaaacaccctgttttacacccaagaatgtaaagtcggctgtttttgttttatttaagataatacaaccactacataataaaagagtagcgatattaaaagaatccgatgagaaaagactaatatttatctatccattcagtttgatttttcaggactttacatcgtcctgaaagtatttgttggtaccggtaccgaggacgcgtaaacatttacagttgcatgtggcctattgtttttagccgttaaatattttataactattaaatagcgatacaaattgttcgaaactaatattgtttatatcatatattctcgcatgttttaaagctttattaaattgattttttgtaaacagtttttcgtactctttgttaacccatttcattacaaaagtttcatatttttttctctctttaaatgccatttttgctggctttctttttaatacaattaatgtgctatccactttaggttttggatggaaataatacctaggaatttttgctaatatagaaatatctacctctgccattaacagcaatgctagtgatctgtttgtatctaataacattttagcaaaaccatattccactattaaataacttattgtggctgaactttcaaaaacaatttttcgaattatatttgtgcttatgttgtaaggtatgctgccaaatattttatatggattgtggctaggaaatgtaaatttcagtatatcatcatttactatttgatagttaggataatttaagagcttattacgagttacctcacataatttagaatcaatttctatcgccgttacaaaattacatctctttaccaatccagcagtaaaatgacctttccctgcacctatttcaaagatgttatctttttcatctaaacttatgcaattcattattttttctatgtgatattttgaagtaataaaattttgactatcttttatatttactttgttcattataacctctccttaatttattgcatctcttttcgaatatttatgttttttgagaaaagaacgtactcatggttcatcccgatatgcgtatcggtctgtatatcagcaactttctatgtgtttcaactacaatagtcatctattctcatctttctgagtccaccccctgcaaagcccctctttacgacataaaaattcggtcggaaaaggtatgcaaaagatgtttctctctttaagagaaactcttcgggatgcaaaaatatgaaaataactccaattcaccaaattatatagcgacttttttacaaaatgctaaaatttgttgatttccgtcaagcaattgttgagcaaaaatgtcttttacgataaaatgatacctcaatatcaactgtttagcaaaacgatatttctcttaaagagagaaacacctttttgttcaccaatccccgacttttaatcccgcggccatgattgaaaaaggaagagtatgagtattcaacatttccgtgtcgcccttattcccttttttgcggcattttgccttcctgtttttgctcacccagaaacgctggtgaaagtaaaagatgctgaagatcagttgggtgcacgagtgggttacatcgaactggatctcaacagcggtaagatccttgagagttttcgccccgaagaacgttttccaatgatgagcacttttaaagttctgctatgtggcgcggtattatcccgtattgacgccgggcaagagcaactcggtcgccgcatacactattctcagaatgacttggttgagtactcaccagtcacagaaaagcatcttacggatggcatgacagtaagagaattatgcagtgctgccataaccatgagtgataacactgcggccaacttacttctgacaacgatcggaggaccgaaggagctaaccgcttttttgcacaacatgggggatcatgtaactcgccttgatcgttgggaaccggagctgaatgaagccataccaaacgacgagcgtgacaccacgatgcctgtagcaatggcaacaacgttgcgcaaactattaactggcgaactacttactctagcttcccggcaacaattaatagactggatggaggcggataaagttgcaggaccacttctgcgctcggcccttccggctggctggtttattgctgataaatctggagccggtgagcgtgggtctcgcggtatcattgcagcactggggccagatggtaagccctcccgtatcgtagttatctacacgacggggagtcaggcaactatggatgaacgaaatagacagatcgctgagataggtgcctcactgattaagcattggtaactgtcagaccaagtttactcataacgcgtcaattcgagggggatcaattccgtgataggtgggctgcccttcctggttggcttggtttcatcagccatccgcttgccctcatctgttacgccggcggtagccggccagcctcgcagagcaggattcccgttgagcaccgccaggtgcgaataagggacagtgaagaaggaacacccgctcgcgggtgggcctacttcacctatcctgcccggctgacgccgttggatacaccaaggaaagtctacacgaaccctttggcaaaatcctgtatatcgtgcgaaaaaggatggatataccgaaaaaatcgctataatgaccccgaagcagggttatgcagcggaaaacggaattgatccggccacgatgcgtccggcgtagaggatctgaagatcagcagttcaacctgttgatagtacgtactaagctctcatgtttcacgtactaagctctcatgtttaacgtactaagctctcatgtttaacgaactaaaccctcatggctaacgtactaagctctcatggctaacgtactaagctctcatgtttcacgtactaagctctcatgtttgaacaataaaattaatataaatcagcaacttaaatagcctctaaggttttaagttttataagaaaaaaaagaatatataaggcttttaaagcttttaag

SEQ ID NO: 63 - DNA, 8583 bp, synthetic construct
  misc_feature 1..8583: note = Description of sequence: pBH301
  source 1..8583: mol_type = other DNA
gtttaacggttgtggacaacaagccagggatgtaacgcactgagaagcccttagagcctctcaaagcaattttgagtgacacaggaacacttaacggctgacatgggaattcccctccaccgcggtggccctgtacaaagaaaattcgacaaactgttatttttctatctatttatttgaattttgagcgctcaaaatttacctttgtcggcaattttgagcgctcaaaattaaataaagatattctcgtcaaacaaatataaataatataaacatggtttttactctggaagattttgttggcgattggcgtcagaccgcgggttataatttggatcaagtcctggaacagggtggcgtaagctctctgttccagaacctgggtgtgagcgtgacgccgattcagcgcatcgttctgtccggcgagaacggtctgaaaattgatattcatgtgatcatcccgtacgaaggcctgagcggtgaccaaatgggtcaaatcgagaaaatctttaaagtcgtctacccagttgacgatcaccacttcaaggttatcttgcattacggtacgctggtgattgatggtgtgaccccgaatatgattgactatttcggccgtccgtatgaaggcattgccgtttttgacggtaaaaagatcaccgtcaccggtaccctgtggaatggcaataagattattgacgagcgtctgattaacccggacggcagcctgctgttccgcgtgaccatcaacggtgtcacgggttggcgtctgtgcgagcgcatcctggcataatgaactgcacttgctttgataattaatgataaacaatctaaaagcactctaatcgttatcggagtgcttttagattactaatcaaattgcttctactaattgcctatcttccagtgatggaacagcatttgaacgcattggctgcaacaatcagccttgatctggaagaagcaatgaaagctgctgttaagtctccgaatcaggtattgttcctgacaggtgtattcccatccggtaaacgcggatactttgcagttgatctgactcaggaataaattataaattaaggtaagaagattgtaggataagctaatgaaatagaaaaaggatgccgtcacacaacttgtcggcattcttttttgttttattagttgaaaatatagtgaaaaagttgcctaaatatgtatgttaacaaattatttgtcgtaactttgcactccaaatctgtttttaacatatggcactagtgaaaccagtaacgttatacgatgtcgcagagtatgccggtgtctcttatcagaccgtttcccgcgtggtgaaccaggccagccacgtttctgcgaaaacgcgggaaaaagtggaagcggcgatggcggagctgaattacattcccaaccgcgtggcacaacaactggcgggcaaacagtcgttgctgattggcgttgccacctccagtctggccctgcacgcgctgtcgcaaattgtcgcggcgattaaatctcgcgcctatcaactgggtgccagcgtgttcgtgtcgatggtagaacgaagcggcatcgaagcctgtaaaacggcggtgcacaatcttctcgcgcaacgcgtcagtgggctgatcattaactatccgctggataaccaggatgccattgctgtggaagctgcctgcactaatgttccggcgttatttcttgatgtctctgaccagacacccatcaacagtattattttctcccatgaagacggtacgcgactgggcgtggagcatctggtcgcattgggtcaccagcaaatcgcgctgttagcgggcccattaagttctgtctcggcgcgtctgcgtctggctggctggcataaatatctcactcgcaatcaaattcagccgatagcggaacgggaaggcgactggagtgccatgtccggttttcaacaaaccatgcaaatgctgaatgagggcatcgttcccactgcgatgctggttgccaacgatcagatggcgctgggcgcaatgcgcgccattaccgagaccgggctgcgcgttggtgcggatatctcggtagtgggatacgacgataccgaagacagctcatgttatatcccgccgttaaccaccatcaaacaggattttcgcctgctggggcaaaccagcgtggaccgcttgctgcaactctctcagggccaggcggtgaagggcaatcagctgttgcccgtctcactggtgaaaagaaaaaccaccctggcgcccaatacgcaaaccgcctctccccgcgcgttggccgattcattaatgcagctggcacgacaggtttcccgactggaaagcgggcagtgagctttcctcggtaccaaattccagaaaagaggcctcccgaaaggggggccttttttcgttttggtcctacttgtgcctgttctatttcctatgcggttcctggccttttgctggccttttgctcacatgttctttcctgcgttatcccctgattctgtggataaccgtattaccgcctttgagtgagctgatacatcccaaatgctgttccatcactggaagataggcaattagtagaagcaatttgattagtaatctaaaagcactccgataacgattagagtgcttttagattgtttatcattaattatcaaagcaagtgcagttcatcactgcccgctttccagtcgggaaacctgtcgtgccagctgcattaatgaatcggccaacgcgcggggagaggcggtttgcgtattgggcgccagggtggtttttcttttcaccagctaagccgaaccgcgttccatcagaatcggagtaagttgtaatcgttgttgctgaagggtcggctgggttatccgatggatgagtacatcaatcgccagctcccccagttcatctttcggttggtggatagtggttaatggtggcgtcataaagcttgccagttcgatatcgtcatagccaatcaccgcgatatcctgcggaacctgtaactctgcctgatataacgcctggtaaacgccaacagccatagcgtcatttccggtaaagacggcctgaggacgcagcggatgtgatagcagttggcgcatagcgtcaaacccgccgttaaattcaaaatcaccagtgacttcatagccatcaggaatgttgagacccgcacgtttcatcgccgcccgataaccttccaaccgcaggcgcgccggagttttatccagcgggccggtaatacaggcgatacgggtatgacctttatcgatcagatattgcgttgctaagtctccgcccagcaacgagttatcctgaataagatcgctgtcgccatcgaacggagcccagtccatcatcacagtaggcactgtcggataacgttgcatgatttcacgcgaaggttgatgcgtttcggtgcacagtaacagcaagccatcaacgcgtttttgcatcagcgtttccagattgcgattcatccgctgttcatcgccttcggtattgcaaaggacgagactataaccgcgttcgaagcagctgcgttcaacgccacgcaccagttctgaatagaaaggattggtactggcagtgatcaacatgccaatggtatgcgacgctttgcccgccagttgttgtgccacgcggttgggaatgtaattgagctccgccatcgccgcttccactttttcccgcgttttcgcagaaacgtggctggcctggttcaccacattggaaacggtctgatgagagacaccggcatactctgcgacatcgtataacgttactggtttcacgtttatattatttatatttgtttgacgagaatatctttatttaattgttatccgctcacaattgccgacaaaggtaattgttatccgctcacaattcaaataaatagatagaaaaataacagtttgtcgaattttctttgtacccgatacttgtgcctgttctatttccgaaccgaccgcttgtatgaatccatcaaaattcgttttctctatgttggattccttgttgctcatattgtgatgataatttctacaaatatagtcattggtaactatctatgaaactgtttgatacttttatagttgattaaacttgttcatggcatttgccttaatatcatccgctatgtcaatgtagggtttcatagctttgtagtcgctgtgtcccgtccatttcatgaccacctgtgccgggattccgagagccagcgcattgcagatgaatgtccttcttcctgcatgggtactgagcaaagcgtatttgggtgtgacttcatcaatacgttcatttcccttgtagtaggtttcccgtacaggctcgttgatttctgccagttcgcccagctctttcaggtaatcgttcatcttctggttgctgatgacgggcagagccatgtaattctcgaaatggatgtccttgtatttgtccagtatggctttgctgtatttgttcagttcaatcgtcaggctgtcggcagtcttgactgtggttatttcgatgtggtcggacttcacatcgcttcttttcagattgcgaacatccgaataccgcaaactcgtaaagcagcagaacaggaaaacatcacgcacacgttccaggtattgcttatccttgggtatctggtagtctttcagcttgttcagttcatcccaagtcaggaagattacttttttcgaggtggttttcagtttcggtttgaacgtatcgtatgcaatgttctgatgatgtcctttcctgaagctccagcgcaggaaccatttgaggaatcccatttgcttgccgatggtgctgtttctcatatccttggtgtcacgcaggaagttgacgtattcgttcaatccaaactcgttgaaatagttgaacgttgcatcctccttgaactctttgaggtggttcctcactgctgcaaatttttcataggtggatgccgtccagttattctggttaccgcactcttttacaaactcatcgaacacctcccaaaagctgacaggggcttcttccggctgttcttcactggtgtctttcattctcatgttgaaagcttccttcaactgttgggtcgttggcatgacctcctgcacctcaaattccttgaaaatattctggatttcggcatagtatttcagcaagtccgtattgatttcggctgcactttgctttagcttgttggtacatccgttctttacccgctgcttatctacatcccatttggctacgtcaatccggtagcccgttgtaaactcgatacgttggctggcaaagatgacacgcatacggatgggtacgttctctacgattggcacaccgttctttttccggctctccaatgcaaaaatgatgttgcgcttgatattcataattgggtgcgtttgaaattctacacccaaatatacacccaattattgagatagcaaaagacatttagaaacatttacttttactctatattgtaatttacacttgattatcagtcgtttgcagttttatgatattctgtgaaagtataagttcgagagcctgtctctccgcaaaaaacgctgaaaatcagcagattgcaaaacaaacaccctgttttacacccaagaatgtaaagtcggctgtttttgttttatttaagataatacaaccactacataataaaagagtagcgatattaaaagaatccgatgagaaaagactaatatttatctatccattcagtttgatttttcaggactttacatcgtcctgaaagtatttgttggtaccggtaccgaggacgcgtaaacatttacagttgcatgtggcctattgtttttagccgttaaatattttataactattaaatagcgatacaaattgttcgaaactaatattgtttatatcatatattctcgcatgttttaaagctttattaaattgattttttgtaaacagtttttcgtactctttgttaacccatttcattacaaaagtttcatatttttttctctctttaaatgccatttttgctggctttctttttaatacaattaatgtgctatccactttaggttttggatggaaataatacctaggaatttttgctaatatagaaatatctacctctgccattaacagcaatgctagtgatctgtttgtatctaataacattttagcaaaaccatattccactattaaataacttattgtggctgaactttcaaaaacaatttttcgaattatatttgtgcttatgttgtaaggtatgctgccaaatattttatatggattgtggctaggaaatgtaaatttcagtatatcatcatttactatttgatagttaggataatttaagagcttattacgagttacctcacataatttagaatcaatttctatcgccgttacaaaattacatctctttaccaatccagcagtaaaatgacctttccctgcacctatttcaaagatgttatctttttcatctaaacttatgcaattcattattttttctatgtgatattttgaagtaataaaattttgactatcttttatatttactttgttcattataacctctccttaatttattgcatctcttttcgaatatttatgttttttgagaaaagaacgtactcatggttcatcccgatatgcgtatcggtctgtatatcagcaactttctatgtgtttcaactacaatagtcatctattctcatctttctgagtccaccccctgcaaagcccctctttacgacataaaaattcggtcggaaaaggtatgcaaaagatgtttctctctttaagagaaactcttcgggatgcaaaaatatgaaaataactccaattcaccaaattatatagcgacttttttacaaaatgctaaaatttgttgatttccgtcaagcaattgttgagcaaaaatgtcttttacgataaaatgatacctcaatatcaactgtttagcaaaacgatatttctcttaaagagagaaacacctttttgttcaccaatccccgacttttaatcccgcggccatgattgaaaaaggaagagtatgagtattcaacatttccgtgtcgcccttattcccttttttgcggcattttgccttcctgtttttgctcacccagaaacgctggtgaaagtaaaagatgctgaagatcagttgggtgcacgagtgggttacatcgaactggatctcaacagcggtaagatccttgagagttttcgccccgaagaacgttttccaatgatgagcacttttaaagttctgctatgtggcgcggtattatcccgtattgacgccgggcaagagcaactcggtcgccgcatacactattctcagaatgacttggttgagtactcaccagtcacagaaaagcatcttacggatggcatgacagtaagagaattatgcagtgctgccataaccatgagtgataacactgcggccaacttacttctgacaacgatcggaggaccgaaggagctaaccgcttttttgcacaacatgggggatcatgtaactcgccttgatcgttgggaaccggagctgaatgaagccataccaaacgacgagcgtgacaccacgatgcctgtagcaatggcaacaacgttgcgcaaactattaactggcgaactacttactctagcttcccggcaacaattaatagactggatggaggcggataaagttgcaggaccacttctgcgctcggcccttccggctggctggtttattgctgataaatctggagccggtgagcgtgggtctcgcggtatcattgcagcactggggccagatggtaagccctcccgtatcgtagttatctacacgacggggagtcaggcaactatggatgaacgaaatagacagatcgctgagataggtgcctcactgattaagcattggtaactgtcagaccaagtttactcataacgcgtcaattcgagggggatcaattccgtgataggtgggctgcccttcctggttggcttggtttcatcagccatccgcttgccctcatctgttacgccggcggtagccggccagcctcgcagagcaggattcccgttgagcaccgccaggtgcgaataagggacagtgaagaaggaacacccgctcgcgggtgggcctacttcacctatcctgcccggctgacgccgttggatacaccaaggaaagtctacacgaaccctttggcaaaatcctgtatatcgtgcgaaaaaggatggatataccgaaaaaatcgctataatgaccccgaagcagggttatgcagcggaaaacggaattgatccggccacgatgcgtccggcgtagaggatctgaagatcagcagttcaacctgttgatagtacgtactaagctctcatgtttcacgtactaagctctcatgtttaacgtactaagctctcatgtttaacgaactaaaccctcatggctaacgtactaagctctcatggctaacgtactaagctctcatgtttcacgtactaagctctcatgtttgaacaataaaattaatataaatcagcaacttaaatagcctctaaggttttaagttttataagaaaaaaaagaatatataaggcttttaaagcttttaag

SEQ ID NO: 64 - DNA, 8582 bp, synthetic construct
  misc_feature 1..8582: note = Description of sequence: pBH302
  source 1..8582: mol_type = other DNA
gtttaacggttgtggacaacaagccagggatgtaacgcactgagaagcccttagagcctctcaaagcaattttgagtgacacaggaacacttaacggctgacatgggaattcccctccaccgcggtggccctgtacaaagaaaattcgacaaactgttatttttctatctatttatttgaattttgagcgctcaaaatttacctttgtcggcaattttgagcgctcaaaattaaataaagatattctcgtcaaacaaatataaataatataaacatggtttttactctggaagattttgttggcgattggcgtcagaccgcgggttataatttggatcaagtcctggaacagggtggcgtaagctctctgttccagaacctgggtgtgagcgtgacgccgattcagcgcatcgttctgtccggcgagaacggtctgaaaattgatattcatgtgatcatcccgtacgaaggcctgagcggtgaccaaatgggtcaaatcgagaaaatctttaaagtcgtctacccagttgacgatcaccacttcaaggttatcttgcattacggtacgctggtgattgatggtgtgaccccgaatatgattgactatttcggccgtccgtatgaaggcattgccgtttttgacggtaaaaagatcaccgtcaccggtaccctgtggaatggcaataagattattgacgagcgtctgattaacccggacggcagcctgctgttccgcgtgaccatcaacggtgtcacgggttggcgtctgtgcgagcgcatcctggcataatgaactgcacttgctttgataattaatgataaacaatctaaaagcactctaatcgttatcggagtgcttttagattactaatcaaattgcttctactaattgcctatcttccagtgatggaacagcatttgaacgcattggctgcaacaatcagccttgatctggaagaagcaatgaaagctgctgttaagtctccgaatcaggtattgttcctgacaggtgtattcccatccggtaaacgcggatactttgcagttgatctgactcaggaataaattataaattaaggtaagaagattgtaggataagctaatgaaatagaaaaaggatgccgtcacacaacttgtcggcattcttttttgttttattagttgaaaatatagtgaaaaagttgcctaaatatgtatgttaacaaattatttgtcgtaactttgcactccaaatctgtttttaacatatggcactagtgaaaccagtaacgttatacgatgtcgcagagtatgccggtgtctctaccgcgaccgtttccaacgtggtgaaccaggccagccacgtttctgcgaaaacgcgggaaaaagtggaagcggcgatggcggagctcaattacattcccaaccgcgtggcacaacaactggcgggcaaagcgtcgcataccattggcatgttgatcactgccagtaccaatcctttctattcagaactggtgcgtggcgttgaacgcagctgcttcgaacgcggttatagtctcgtcctttgcaataccgaaggcgatgaacagcggatgaatcgcaatctggaaacgctgatgcaaaaacgcgttgatggcttgctgttactgtgcaccgaaacgcatcaaccttcgcgtgaaatcatgcaacgttatccgacagtgcctactgtgatgatggactgggctccgttcgatggcgacagcgatcttattcaggataactcgttgctgggcggagacttagcaacgcaatatctgatcgataaaggtcatacccgtatcgcctgtattaccggcccgctggataaaactccggcgcgcctgcggttggaaggttatcgggcggcgatgaaacgtgcgggtctcaacattcctgatggctatgaagtcactggtgattttgaatttaacggcgggtttgacgctatgcgccaactgctatcacatccgctgcgtcctcaggccgtctttaccggaaatgacgctatggctgttggcgtttaccaggcgttatatcaggcagagttacaggttccgcaggatatcgcggtgattggctatgacgatatcgaactggcaagctttatgacgccaccattaaccactatccaccaaccgaaagatgaactgggggagctggcgattgatgtactcatccatcggataacccagccgacccttcagcaacaacgattacaacttactccgattctgatggaacgcggttcggcttagctggtgaaaagaaaaaccaccctggcgcccaatacgcaaaccgcctctccccgcgcgttggccgattcattaatgcagctggcacgacaggtttcccgactggaaagcgggcagtgagctttcctcggtaccaaattccagaaaagaggcctcccgaaaggggggccttttttcgttttggtcctacttgtgcctgttctatttcctatgcggttcctggccttttgctggccttttgctcacatgttctttcctgcgttatcccctgattctgtggataaccgtattaccgcctttgagtgagctgatacatcccaaatgctgttccatcactggaagataggcaattagtagaagcaatttgattagtaatctaaaagcactccgataacgattagagtgcttttagattgtttatcattaattatcaaagcaagtgcagttcatcactgcccgctttccagtcgggaaacctgtcgtgccagctgcattaatgaatcggccaacgcgcggggagaggcggtttgcgtattgggcgccagggtggtttttcttttcaccagtgagacgggcaacagctgattgcccttcaccgcctggccctgagagagttgcagcaagcggtccacgctggtttgccccagcaggcgaaaatcctgtttgatggtggttaacggcgggatataacatgagctgtcttcggtatcgtcgtatcccactaccgagatatccgcaccaacgcgcagcccggtctcggtaatggcgcgcattgcgcccagcgccatctgatcgttggcaaccagcatcgcagtgggaacgatgccctcattcagcatttgcatggtttgttgaaaaccggacatggcactccagtcgccttcccgttccgctatcggctgaatttgattgcgagtgagatatttatgccagccagccagacgcagacgcgccgagacagaacttaatgggcccgctaacagcgcgatttgctggtgacccaatgcgaccagatgctccacgcccagtcgcgtaccgtcttcatgggagaaaataatactgttgatgggtgtctggtcagagacatcaagaaataacgccggaacattagtgcaggcagcttccacagcaatggcatcctggttatccagcggatagttaatgatcagcccactgacgcgttgcgcgagaagattgtgcaccgccgttttacaggcttcgatgccgcttcgttctaccatcgacacgaacacgctggcacccagttgataggcgcgagatttaatcgccgcgacaatttgcgacagcgcgtgcagggccagactggaggtggcaacgccaatcagcaacgactgtttgcccgccagttgttgtgccacgcggttgggaatgtaattcagctccgccatcgccgcttccactttttcccgcgttttcgcagaaacgtggctggcctggttcaccacattggaaacggtctgatgagagacaccggcatactctgcgacatcgtataacgttactggtttcacgtttatattatttatatttgtttgacgagaatatctttatttaattttaagcgcttaaaattgccgacaaaggtaaattttaagcgcttaaaattcaaataaatagatagaaaaataacagtttgtcgaattttctttgtacccgatacttgtgcctgttctatttccgaaccgaccgcttgtatgaatccatcaaaattcgttttctctatgttggattccttgttgctcatattgtgatgataatttctacaaatatagtcattggtaactatctatgaaactgtttgatacttttatagttgattaaacttgttcatggcatttgccttaatatcatccgctatgtcaatgtagggtttcatagctttgtagtcgctgtgtcccgtccatttcatgaccacctgtgccgggattccgagagccagcgcattgcagatgaatgtccttcttcctgcatgggtactgagcaaagcgtatttgggtgtgacttcatcaatacgttcatttcccttgtagtaggtttcccgtacaggctcgttgatttctgccagttcgcccagctctttcaggtaatcgttcatcttctggttgctgatgacgggcagagccatgtaattctcgaaatggatgtccttgtatttgtccagtatggctttgctgtatttgttcagttcaatcgtcaggctgtcggcagtcttgactgtggttatttcgatgtggtcggacttcacatcgcttcttttcagattgcgaacatccgaataccgcaaactcgtaaagcagcagaacaggaaaacatcacgcacacgttccaggtattgcttatccttgggtatctggtagtctttcagcttgttcagttcatcccaagtcaggaagattacttttttcgaggtggttttcagtttcggtttgaacgtatcgtatgcaatgttctgatgatgtcctttcctgaagctccagcgcaggaaccatttgaggaatcccatttgcttgccgatggtgctgtttctcatatccttggtgtcacgcaggaagttgacgtattcgttcaatccaaactcgttgaaatagttgaacgttgcatcctccttgaactctttgaggtggttcctcactgctgcaaatttttcataggtggatgccgtccagttattctggttaccgcactcttttacaaactcatcgaacacctcccaaaagctgacaggggcttcttccggctgttcttcactggtgtctttcattctcatgttgaaagcttccttcaactgttgggtcgttggcatgacctcctgcacctcaaattccttgaaaatattctggatttcggcatagtatttcagcaagtccgtattgatttcggctgcactttgctttagcttgttggtacatccgttctttacccgctgcttatctacatcccatttggctacgtcaatccggtagcccgttgtaaactcgatacgttggctggcaaagatgacacgcatacggatgggtacgttctctacgattggcacaccgttctttttccggctctccaatgcaaaaatgatgttgcgcttgatattcataattgggtgcgtttgaaattctacacccaaatatacacccaattattgagatagcaaaagacatttagaaacatttacttttactctatattgtaatttacacttgattatcagtcgtttgcagttttatgatattctgtgaaagtataagttcgagagcctgtctctccgcaaaaaacgctgaaaatcagcagattgcaaaacaaacaccctgttttacacccaagaatgtaaagtcggctgtttttgttttatttaagataatacaaccactacataataaaagagtagcgatattaaaagaatccgatgagaaaagactaatatttatctatccattcagtttgatttttcaggactttacatcgtcctgaaagtatttgttggtaccggtaccgaggacgcgtaaacatttacagttgcatgtggcctattgtttttagccgttaaatattttataactattaaatagcgatacaaattgttcgaaactaatattgtttatatcatatattctcgcatgttttaaagctttattaaattgattttttgtaaacagtttttcgtactctttgttaacccatttcattacaaaagtttcatatttttttctctctttaaatgccatttttgctggctttctttttaatacaattaatgtgctatccactttaggttttggatggaaataatacctaggaatttttgctaatatagaaatatctacctctgccattaacagcaatgctagtgatctgtttgtatctaataacattttagcaaaaccatattccactattaaataacttattgtggctgaactttcaaaaacaatttttcgaattatatttgtgcttatgttgtaaggtatgctgccaaatattttatatggattgtggctaggaaatgtaaatttcagtatatcatcatttactatttgatagttaggataatttaagagcttattacgagttacctcacataatttagaatcaatttctatcgccgttacaaaattacatctctttaccaatccagcagtaaaatgacctttccctgcacctatttcaaagatgttatctttttcatctaaacttatgcaattcattattttttctatgtgatattttgaagtaataaaattttgactatcttttatatttactttgttcattataacctctccttaatttattgcatctcttttcgaatatttatgttttttgagaaaagaacgtactcatggttcatcccgatatgcgtatcggtctgtatatcagcaactttctatgtgtttcaactacaatagtcatctattctcatctttctgagtccaccccctgcaaagcccctctttacgacataaaaattcggtcggaaaaggtatgcaaaagatgtttctctctttaagagaaactcttcgggatgcaaaaatatgaaaataactccaattcaccaaattatatagcgacttttttacaaaatgctaaaatttgttgatttccgtcaagcaattgttgagcaaaaatgtcttttacgataaaatgatacctcaatatcaactgtttagcaaaacgatatttctcttaaagagagaaacacctttttgttcaccaatccccgacttttaatcccgcggccatgattgaaaaaggaagagtatgagtattcaacatttccgtgtcgcccttattcccttttttgcggcattttgccttcctgtttttgctcacccagaaacgctggtgaaagtaaaagatgctgaagatcagttgggtgcacgagtgggttacatcgaactggatctcaacagcggtaagatccttgagagttttcgccccgaagaacgttttccaatgatgagcacttttaaagttctgctatgtggcgcggtattatcccgtattgacgccgggcaagagcaactcggtcgccgcatacactattctcagaatgacttggttgagtactcaccagtcacagaaaagcatcttacggatggcatgacagtaagagaattatgcagtgctgccataaccatgagtgataacactgcggccaacttacttctgacaacgatcggaggaccgaaggagctaaccgcttttttgcacaacatgggggatcatgtaactcgccttgatcgttgggaaccggagctgaatgaagccataccaaacgacgagcgtgacaccacgatgcctgtagcaatggcaacaacgttgcgcaaactattaactggcgaactacttactctagcttcccggcaacaattaatagactggatggaggcggataaagttgcaggaccacttctgcgctcggcccttccggctggctggtttattgctgataaatctggagccggtgagcgtgggtctcgcggtatcattgcagcactggggccagatggtaagccctcccgtatcgtagttatctacacgacggggagtcaggcaactatggatgaacgaaatagacagatcgctgagataggtgcctcactgattaagcattggtaactgtcagaccaagtttactcataacgcgtcaattcgagggggatcaattccgtgataggtgggctgcccttcctggttggcttggtttcatcagccatccgcttgccctcatctgttacgccggcggtagccggccagcctcgcagagcaggattcccgttgagcaccgccaggtgcgaataagggacagtgaagaaggaacacccgctcgcgggtgggcctacttcacctatcctgcccggctgacgccgttggatacaccaaggaaagtctacacgaaccctttggcaaaatcctgtatatcgtgcgaaaaaggatggatataccgaaaaaatcgctataatgaccccgaagcagggttatgcagcggaaaacggaattgatccggccacgatgcgtccggcgtagaggatctgaagatcagcagttcaacctgttgatagtacgtactaagctctcatgtttcacgtactaagctctcatgtttaacgtactaagctctcatgtttaacgaactaaaccctcatggctaacgtactaagctctcatggctaacgtactaagctctcatgtttcacgtactaagctctcatgtttgaacaataaaattaatataaatcagcaacttaaatagcctctaaggttttaagttttataagaaaaaaaagaatatataaggcttttaaagcttttaag

SEQ ID NO: 65 - DNA, 8583 bp, synthetic construct
  misc_feature 1..8583: note = Description of sequence: pBH303
  source 1..8583: mol_type = other DNA
gtttaacggttgtggacaacaagccagggatgtaacgcactgagaagcccttagagcctctcaaagcaattttgagtgacacaggaacacttaacggctgacatgggaattcccctccaccgcggtggccctgtacaaagaaaattcgacaaactgttatttttctatctatttatttgaattttgagcgctcaaaatttacctttgtcggcaattttgagcgctcaaaattaaataaagatattctcgtcaaacaaatataaataatataaacatggtttttactctggaagattttgttggcgattggcgtcagaccgcgggttataatttggatcaagtcctggaacagggtggcgtaagctctctgttccagaacctgggtgtgagcgtgacgccgattcagcgcatcgttctgtccggcgagaacggtctgaaaattgatattcatgtgatcatcccgtacgaaggcctgagcggtgaccaaatgggtcaaatcgagaaaatctttaaagtcgtctacccagttgacgatcaccacttcaaggttatcttgcattacggtacgctggtgattgatggtgtgaccccgaatatgattgactatttcggccgtccgtatgaaggcattgccgtttttgacggtaaaaagatcaccgtcaccggtaccctgtggaatggcaataagattattgacgagcgtctgattaacccggacggcagcctgctgttccgcgtgaccatcaacggtgtcacgggttggcgtctgtgcgagcgcatcctggcataatgaactgcacttgctttgataattaatgataaacaatctaaaagcactctaatcgttatcggagtgcttttagattactaatcaaattgcttctactaattgcctatcttccagtgatggaacagcatttgaacgcattggctgcaacaatcagccttgatctggaagaagcaatgaaagctgctgttaagtctccgaatcaggtattgttcctgacaggtgtattcccatccggtaaacgcggatactttgcagttgatctgactcaggaataaattataaattaaggtaagaagattgtaggataagctaatgaaatagaaaaaggatgccgtcacacaacttgtcggcattcttttttgttttattagttgaaaatatagtgaaaaagttgcctaaatatgtatgttaacaaattatttgtcgtaactttgcactccaaatctgtttttaacatatggcactagtgaaaccagtaacgttatacgatgtcgcagagtatgccggtgtctcttatcagaccgtttcccgcgtggtgaaccaggccagccacgtttctgcgaaaacgcgggaaaaagtggaagcggcgatggcggagctgaattacattcccaaccgcgtggcacaacaactggcgggcaaacagtcgttgctgattggcgttgccacctccagtctggccctgcacgcgccgtcgcaaattgtcgcggcgattaaatctcgcgccgatcaactgggtgccagcgtggtggtgtcgatggtagaacgaagcggcgtcgaagcctgtaaaacggcggtgcacaatcttctcgcgcaacgcgtcagtgggctgatcattaactatccgctggatgaccaggatgccattgctgtggaagctgcctgcactaatgttccggcgttatttcttgatgtctctgaccagacacccatcaacagtattattttctcccatgaagacggtacgcgactgggcgtggagcatctggtcgcattgggtcaccagcaaatcgcgctgttagcgggcccattaagttctgtctcggcgcgtctgcgtctggctggctggcataaatatctcactcgcaatcaaattcagccgatagcggaacgggaaggcgactggagtgccatgtccggttttcaacaaaccatgcaaatgctgaatgagggcatcgttcccactgcgatgctggttgccaacgatcagatggcgctgggcgcaatgcgcgccattaccgagtccgggctgcgcgttggtgcggatatctcggtagtgggatacgacgataccgaagacagctcatgttatatcccgccgttaaccaccatcaaacaggattttcgcctgctggggcaaaccagcgtggaccgcttgctgcaactctctcagggccaggcggtgaagggcaatcagctgttgcccgtctcactggtgaaaagaaaaaccaccctggcgcccaatacgcaaaccgcctctccccgcgcgttggccgattcattaatgcagctggcacgacaggtttcccgactggaaagcgggcagtgagctttcctcggtaccaaattccagaaaagaggcctcccgaaaggggggccttttttcgttttggtcctacttgtgcctgttctatttcctatgcggttcctggccttttgctggccttttgctcacatgttctttcctgcgttatcccctgattctgtggataaccgtattaccgcctttgagtgagctgatacatcccaaatgctgttccatcactggaagataggcaattagtagaagcaatttgattagtaatctaaaagcactccgataacgattagagtgcttttagattgtttatcattaattatcaaagcaagtgcagttcatcactgcccgctttccagtcgggaaacctgtcgtgccagctgcattaatgaatcggccaacgcgcggggagaggcggtttgcgtattgggcgccagggtggtttttcttttcaccagctaagccgaaccgcgttccatcagaatcggagtaagttgtaatcgttgttgctgaagggtcggctgggttatccgatggatgagtacatcaatcgccagctcccccagttcatctttcggttggtggatagtggttaatggtggcgtcataaagcttgccagttcgatatcgtcatagccaatcaccgcgatatcctgcggaacctgtaactctgcctgatataacgcctggtaaacgccaacagccatagcgtcatttccggtaaagacggcctgaggacgcagcggatgtgatagcagttggcgcatagcgtcaaacccgccgttaaattcaaaatcaccagtgacttcatagccatcaggaatgttgagacccgcacgtttcatcgccgcccgataaccttccaaccgcaggcgcgccggagttttatccagcgggccggtaatacaggcgatacgggtatgacctttatcgatcagatattgcgttgctaagtctccgcccagcaacgagttatcctgaataagatcgctgtcgccatcgaacggagcccagtccatcatcacagtaggcactgtcggataacgttgcatgatttcacgcgaaggttgatgcgtttcggtgcacagtaacagcaagccatcaacgcgtttttgcatcagcgtttccagattgcgattcatccgctgttcatcgccttcggtattgcaaaggacgagactataaccgcgttcgaagcagctgcgttcaacgccacgcaccagttctgaatagaaaggattggtactggcagtgatcaacatgccaatggtatgcgacgctttgcccgccagttgttgtgccacgcggttgggaatgtaattgagctccgccatcgccgcttccactttttcccgcgttttcgcagaaacgtggctggcctggttcaccacattggaaacggtctgatgagagacaccggcatactctgcgacatcgtataacgttactggtttcacgtttatattatttatatttgtttgacgagaatatctttatttaattgttatccgctcacaattgccgacaaaggtaattgttatccgctcacaattcaaataaatagatagaaaaataacagtttgtcgaattttctttgtacccgatacttgtgcctgttctatttccgaaccgaccgcttgtatgaatccatcaaaattcgttttctctatgttggattccttgttgctcatattgtgatgataatttctacaaatatagtcattggtaactatctatgaaactgtttgatacttttatagttgattaaacttgttcatggcatttgccttaatatcatccgctatgtcaatgtagggtttcatagctttgtagtcgctgtgtcccgtccatttcatgaccacctgtgccgggattccgagagccagcgcattgcagatgaatgtccttcttcctgcatgggtactgagcaaagcgtatttgggtgtgacttcatcaatacgttcatttcccttgtagtaggtttcccgtacaggctcgttgatttctgccagttcgcccagctctttcaggtaatcgttcatcttctggttgctgatgacgggcagagccatgtaattctcgaaatggatgtccttgtatttgtccagtatggctttgctgtatttgttcagttcaatcgtcaggctgtcggcagtcttgactgtggttatttcgatgtggtcggacttcacatcgcttcttttcagattgcgaacatccgaataccgcaaactcgtaaagcagcagaacaggaaaacatcacgcacacgttccaggtattgcttatccttgggtatctggtagtctttcagcttgttcagttcatcccaagtcaggaagattacttttttcgaggtggttttcagtttcggtttgaacgtatcgtatgcaatgttctgatgatgtcctttcctgaagctccagcgcaggaaccatttgaggaatcccatttgcttgccgatggtgctgtttctcatatccttggtgtcacgcaggaagttgacgtattcgttcaatccaaactcgttgaaatagttgaacgttgcatcctccttgaactctttgaggtggttcctcactgctgcaaatttttcataggtggatgccgtccagttattctggttaccgcactcttttacaaactcatcgaacacctcccaaaagctgacaggggcttcttccggctgttcttcactggtgtctttcattctcatgttgaaagcttccttcaactgttgggtcgttggcatgacctcctgcacctcaaattccttgaaaatattctggatttcggcatagtatttcagcaagtccgtattgatttcggctgcactttgctttagcttgttggtacatccgttctttacccgctgcttatctacatcccatttggctacgtcaatccggtagcccgttgtaaactcgatacgttggctggcaaagatgacacgcatacggatgggtacgttctctacgattggcacaccgttctttttccggctctccaatgcaaaaatgatgttgcgcttgatattcataattgggtgcgtttgaaattctacacccaaatatacacccaattattgagatagcaaaagacatttagaaacatttacttttactctatattgtaatttacacttgattatcagtcgtttgcagttttatgatattctgtgaaagtataagttcgagagcctgtctctccgcaaaaaacgctgaaaatcagcagattgcaaaacaaacaccctgttttacacccaagaatgtaaagtcggctgtttttgttttatttaagataatacaaccactacataataaaagagtagcgatattaaaagaatccgatgagaaaagactaatatttatctatccattcagtttgatttttcaggactttacatcgtcctgaaagtatttgttggtaccggtaccgaggacgcgtaaacatttacagttgcatgtggcctattgtttttagccgttaaatattttataactattaaatagcgatacaaattgttcgaaactaatattgtttatatcatatattctcgcatgttttaaagctttattaaattgattttttgtaaacagtttttcgtactctttgttaacccatttcattacaaaagtttcatatttttttctctctttaaatgccatttttgctggctttctttttaatacaattaatgtgctatccactttaggttttggatggaaataatacctaggaatttttgctaatatagaaatatctacctctgccattaacagcaatgctagtgatctgtttgtatctaataacattttagcaaaaccatattccactattaaataacttattgtggctgaactttcaaaaacaatttttcgaattatatttgtgcttatgttgtaaggtatgctgccaaatattttatatggattgtggctaggaaatgtaaatttcagtatatcatcatttactatttgatagttaggataatttaagagcttattacgagttacctcacataatttagaatcaatttctatcgccgttacaaaattacatctctttaccaatccagcagtaaaatgacctttccctgcacctatttcaaagatgttatctttttcatctaaacttatgcaattcattattttttctatgtgatattttgaagtaataaaattttgactatcttttatatttactttgttcattataacctctccttaatttattgcatctcttttcgaatatttatgttttttgagaaaagaacgtactcatggttcatcccgatatgcgtatcggtctgtatatcagcaactttctatgtgtttcaactacaatagtcatctattctcatctttctgagtccaccccctgcaaagcccctctttacgacataaaaattcggtcggaaaaggtatgcaaaagatgtttctctctttaagagaaactcttcgggatgcaaaaatatgaaaataactccaattcaccaaattatatagcgacttttttacaaaatgctaaaatttgttgatttccgtcaagcaattgttgagcaaaaatgtcttttacgataaaatgatacctcaatatcaactgtttagcaaaacgatatttctcttaaagagagaaacacctttttgttcaccaatccccgacttttaatcccgcggccatgattgaaaaaggaagagtatgagtattcaacatttccgtgtcgcccttattcccttttttgcggcattttgccttcctgtttttgctcacccagaaacgctggtgaaagtaaaagatgctgaagatcagttgggtgcacgagtgggttacatcgaactggatctcaacagcggtaagatccttgagagttttcgccccgaagaacgttttccaatgatgagcacttttaaagttctgctatgtggcgcggtattatcccgtattgacgccgggcaagagcaactcggtcgccgcatacactattctcagaatgacttggttgagtactcaccagtcacagaaaagcatcttacggatggcatgacagtaagagaattatgcagtgctgccataaccatgagtgataacactgcggccaacttacttctgacaacgatcggaggaccgaaggagctaaccgcttttttgcacaacatgggggatcatgtaactcgccttgatcgttgggaaccggagctgaatgaagccataccaaacgacgagcgtgacaccacgatgcctgtagcaatggcaacaacgttgcgcaaactattaactggcgaactacttactctagcttcccggcaacaattaatagactggatggaggcggataaagttgcaggaccacttctgcgctcggcccttccggctggctggtttattgctgataaatctggagccggtgagcgtgggtctcgcggtatcattgcagcactggggccagatggtaagccctcccgtatcgtagttatctacacgacggggagtcaggcaactatggatgaacgaaatagacagatcgctgagataggtgcctcactgattaagcattggtaactgtcagaccaagtttactcataacgcgtcaattcgagggggatcaattccgtgataggtgggctgcccttcctggttggcttggtttcatcagccatccgcttgccctcatctgttacgccggcggtagccggccagcctcgcagagcaggattcccgttgagcaccgccaggtgcgaataagggacagtgaagaaggaacacccgctcgcgggtgggcctacttcacctatcctgcccggctgacgccgttggatacaccaaggaaagtctacacgaaccctttggcaaaatcctgtatatcgtgcgaaaaaggatggatataccgaaaaaatcgctataatgaccccgaagcagggttatgcagcggaaaacggaattgatccggccacgatgcgtccggcgtagaggatctgaagatcagcagttcaacctgttgatagtacgtactaagctctcatgtttcacgtactaagctctcatgtttaacgtactaagctctcatgtttaacgaactaaaccctcatggctaacgtactaagctctcatggctaacgtactaagctctcatgtttcacgtactaagctctcatgtttgaacaataaaattaatataaatcagcaacttaaatagcctctaaggttttaagttttataagaaaaaaaagaatatataaggcttttaaagcttttaag

SEQ ID NO: 66 - DNA, 8582 bp, synthetic construct
  misc_feature 1..8582: note = Description of sequence: pBH304
  source 1..8582: mol_type = other DNA
gtttaacggttgtggacaacaagccagggatgtaacgcactgagaagcccttagagcctctcaaagcaattttgagtgacacaggaacacttaacggctgacatgggaattcccctccaccgcggtggccctgtacaaagaaaattcgacaaactgttatttttctatctatttatttgaattttgagcgctcaaaatttacctttgtcggcaattttgagcgctcaaaattaaataaagatattctcgtcaaacaaatataaataatataaacatggtttttactctggaagattttgttggcgattggcgtcagaccgcgggttataatttggatcaagtcctggaacagggtggcgtaagctctctgttccagaacctgggtgtgagcgtgacgccgattcagcgcatcgttctgtccggcgagaacggtctgaaaattgatattcatgtgatcatcccgtacgaaggcctgagcggtgaccaaatgggtcaaatcgagaaaatctttaaagtcgtctacccagttgacgatcaccacttcaaggttatcttgcattacggtacgctggtgattgatggtgtgaccccgaatatgattgactatttcggccgtccgtatgaaggcattgccgtttttgacggtaaaaagatcaccgtcaccggtaccctgtggaatggcaataagattattgacgagcgtctgattaacccggacggcagcctgctgttccgcgtgaccatcaacggtgtcacgggttggcgtctgtgcgagcgcatcctggcataatgaactgcacttgctttgataattaatgataaacaatctaaaagcactctaatcgttatcggagtgcttttagattactaatcaaattgcttctactaattgcctatcttccagtgatggaacagcatttgaacgcattggctgcaacaatcagccttgatctggaagaagcaatgaaagctgctgttaagtctccgaatcaggtattgttcctgacaggtgtattcccatccggtaaacgcggatactttgcagttgatctgactcaggaataaattataaattaaggtaagaagattgtaggataagctaatgaaatagaaaaaggatgccgtcacacaacttgtcggcattcttttttgttttattagttgaaaatatagtgaaaaagttgcctaaatatgtatgttaacaaattatttgtcgtaactttgcactccaaatctgtttttaacatatggcactagtgaaaccagtaacgttatacgatgtcgcagagtatgccggtgtctctaccgcgaccgtttccaacgtggtgaaccaggccagccacgtttctgcgaaaacgcgggaaaaagtggaagcggcgatggcggagctcaattacattcccaaccgcgtggcacaacaactggcgggcaaagcgtcgcataccattggcatgttgatcactgccagtaccaatcctttctattcagaactggtgcgtggcgttgaacgcagctgcttcgaacgcggttatagtctcgtcctttgcaataccgaaggcgatgaacagcggatgaatcgcaatctggaaacgctgatgcaaaaacgcgttgatggcttgctgttactgtgcaccgaaacgcatcaaccttcgcgtgaaatcatgcaacgttatccgacagtgcctactgtgatgatggactgggctccgttcgatggcgacagcgatcttattcaggataactcgttgctgggcggagacttagcaacgcaatatctgatcgataaaggtcatacccgtatcgcctgtattaccggcccgctggataaaactccggcgcgcctgcggttggaaggttatcgggcggcgatgaaacgtgcgggtctcaacattcctgatggctatgaagtcactggtgattttgaatttaacggcgggtttgacgctatgcgccaactgctatcacatccgctgcgtcctcaggccgtctttaccggaaatgacgctatggctgttggcgtttaccaggcgttatatcaggcagagttacaggttccgcaggatatcgcggtgattggctatgacgatatcgaactggcaagctttatgacgccaccattaaccactatccaccaaccgaaagatgaactgggggagctggcgattgatgtactcatccatcggataacccagccgacccttcagcaacaacgattacaacttactccgattctgatggaacgcggttcggcttagctggtgaaaagaaaaaccaccctggcgcccaatacgcaaaccgcctctccccgcgcgttggccgattcattaatgcagctggcacgacaggtttcccgactggaaagcgggcagtgagctttcctcggtaccaaattccagaaaagaggcctcccgaaaggggggccttttttcgttttggtcctacttgtgcctgttctatttcctatgcggttcctggccttttgctggccttttgctcacatgttctttcctgcgttatcccctgattctgtggataaccgtattaccgcctttgagtgagctgatacatcccaaatgctgttccatcactggaagataggcaattagtagaagcaatttgattagtaatctaaaagcactccgataacgattagagtgcttttagattgtttatcattaattatcaaagcaagtgcagttcatcactgcccgctttccagtcgggaaacctgtcgtgccagctgcattaatgaatcggccaacgcgcggggagaggcggtttgcgtattgggcgccagggtggtttttcttttcaccagtgagacgggcaacagctgattgcccttcaccgcctggccctgagagagttgcagcaagcggtccacgctggtttgccccagcaggcgaaaatcctgtttgatggtggttaacggcgggatataacatgagctgtcttcggtatcgtcgtatcccactaccgagatatccgcaccaacgcgcagcccggactcggtaatggcgcgcattgcgcccagcgccatctgatcgttggcaaccagcatcgcagtgggaacgatgccctcattcagcatttgcatggtttgttgaaaaccggacatggcactccagtcgccttcccgttccgctatcggctgaatttgattgcgagtgagatatttatgccagccagccagacgcagacgcgccgagacagaacttaatgggcccgctaacagcgcgatttgctggtgacccaatgcgaccagatgctccacgcccagtcgcgtaccgtcttcatgggagaaaataatactgttgatgggtgtctggtcagagacatcaagaaataacgccggaacattagtgcaggcagcttccacagcaatggcatcctggtcatccagcggatagttaatgatcagcccactgacgcgttgcgcgagaagattgtgcaccgccgttttacaggcttcgacgccgcttcgttctaccatcgacaccaccacgctggcacccagttgatcggcgcgagatttaatcgccgcgacaatttgcgacggcgcgtgcagggccagactggaggtggcaacgccaatcagcaacgactgtttgcccgccagttgttgtgccacgcggttgggaatgtaattcagctccgccatcgccgcttccactttttcccgcgttttcgcagaaacgtggctggcctggttcaccacgcgggaaacggtctgataagagacaccggcatactctgcgacatcgtataacgttactggtttcacgtttatattatttatatttgtttgacgagaatatctttatttaattttaagcgcttaaaattgccgacaaaggtaaattttaagcgcttaaaattcaaataaatagatagaaaaataacagtttgtcgaattttctttgtacccgatacttgtgcctgttctatttccgaaccgaccgcttgtatgaatccatcaaaattcgttttctctatgttggattccttgttgctcatattgtgatgataatttctacaaatatagtcattggtaactatctatgaaactgtttgatacttttatagttgattaaacttgttcatggcatttgccttaatatcatccgctatgtcaatgtagggtttcatagctttgtagtcgctgtgtcccgtccatttcatgaccacctgtgccgggattccgagagccagcgcattgcagatgaatgtccttcttcctgcatgggtactgagcaaagcgtatttgggtgtgacttcatcaatacgttcatttcccttgtagtaggtttcccgtacaggctcgttgatttctgccagttcgcccagctctttcaggtaatcgttcatcttctggttgctgatgacgggcagagccatgtaattctcgaaatggatgtccttgtatttgtccagtatggctttgctgtatttgttcagttcaatcgtcaggctgtcggcagtcttgactgtggttatttcgatgtggtcggacttcacatcgcttcttttcagattgcgaacatccgaataccgcaaactcgtaaagcagcagaacaggaaaacatcacgcacacgttccaggtattgcttatccttgggtatctggtagtctttcagcttgttcagttcatcccaagtcaggaagattacttttttcgaggtggttttcagtttcggtttgaacgtatcgtatgcaatgttctgatgatgtcctttcctgaagctccagcgcaggaaccatttgaggaatcccatttgcttgccgatggtgctgtttctcatatccttggtgtcacgcaggaagttgacgtattcgttcaatccaaactcgttgaaatagttgaacgttgcatcctccttgaactctttgaggtggttcctcactgctgcaaatttttcataggtggatgccgtccagttattctggttaccgcactcttttacaaactcatcgaacacctcccaaaagctgacaggggcttcttccggctgttcttcactggtgtctttcattctcatgttgaaagcttccttcaactgttgggtcgttggcatgacctcctgcacctcaaattccttgaaaatattctggatttcggcatagtatttcagcaagtccgtattgatttcggctgcactttgctttagcttgttggtacatccgttctttacccgctgcttatctacatcccatttggctacgtcaatccggtagcccgttgtaaactcgatacgttggctggcaaagatgacacgcatacggatgggtacgttctctacgattggcacaccgttctttttccggctctccaatgcaaaaatgatgttgcgcttgatattcataattgggtgcgtttgaaattctacacccaaatatacacccaattattgagatagcaaaagacatttagaaacatttacttttactctatattgtaatttacacttgattatcagtcgtttgcagttttatgatattctgtgaaagtataagttcgagagcctgtctctccgcaaaaaacgctgaaaatcagcagattgcaaaacaaacaccctgttttacacccaagaatgtaaagtcggctgtttttgttttatttaagataatacaaccactacataataaaagagtagcgatattaaaagaatccgatgagaaaagactaatatttatctatccattcagtttgatttttcaggactttacatcgtcctgaaagtatttgttggtaccggtaccgaggacgcgtaaacatttacagttgcatgtggcctattgtttttagccgttaaatattttataactattaaatagcgatacaaattgttcgaaactaatattgtttatatcatatattctcgcatgttttaaagctttattaaattgattttttgtaaacagtttttcgtactctttgttaacccatttcattacaaaagtttcatatttttttctctctttaaatgccatttttgctggctttctttttaatacaattaatgtgctatccactttaggttttggatggaaataatacctaggaatttttgctaatatagaaatatctacctctgccattaacagcaatgctagtgatctgtttgtatctaataacattttagcaaaaccatattccactattaaataacttattgtggctgaactttcaaaaacaatttttcgaattatatttgtgcttatgttgtaaggtatgctgccaaatattttatatggattgtggctaggaaatgtaaatttcagtatatcatcatttactatttgatagttaggataatttaagagcttattacgagttacctcacataatttagaatcaatttctatcgccgttacaaaattacatctctttaccaatccagcagtaaaatgacctttccctgcacctatttcaaagatgttatctttttcatctaaacttatgcaattcattattttttctatgtgatattttgaagtaataaaattttgactatcttttatatttactttgttcattataacctctccttaatttattgcatctcttttcgaatatttatgttttttgagaaaagaacgtactcatggttcatcccgatatgcgtatcggtctgtatatcagcaactttctatgtgtttcaactacaatagtcatctattctcatctttctgagtccaccccctgcaaagcccctctttacgacataaaaattcggtcggaaaaggtatgcaaaagatgtttctctctttaagagaaactcttcgggatgcaaaaatatgaaaataactccaattcaccaaattatatagcgacttttttacaaaatgctaaaatttgttgatttccgtcaagcaattgttgagcaaaaatgtcttttacgataaaatgatacctcaatatcaactgtttagcaaaacgatatttctcttaaagagagaaacacctttttgttcaccaatccccgacttttaatcccgcggccatgattgaaaaaggaagagtatgagtattcaacatttccgtgtcgcccttattcccttttttgcggcattttgccttcctgtttttgctcacccagaaacgctggtgaaagtaaaagatgctgaagatcagttgggtgcacgagtgggttacatcgaactggatctcaacagcggtaagatccttgagagttttcgccccgaagaacgttttccaatgatgagcacttttaaagttctgctatgtggcgcggtattatcccgtattgacgccgggcaagagcaactcggtcgccgcatacactattctcagaatgacttggttgagtactcaccagtcacagaaaagcatcttacggatggcatgacagtaagagaattatgcagtgctgccataaccatgagtgataacactgcggccaacttacttctgacaacgatcggaggaccgaaggagctaaccgcttttttgcacaacatgggggatcatgtaactcgccttgatcgttgggaaccggagctgaatgaagccataccaaacgacgagcgtgacaccacgatgcctgtagcaatggcaacaacgttgcgcaaactattaactggcgaactacttactctagcttcccggcaacaattaatagactggatggaggcggataaagttgcaggaccacttctgcgctcggcccttccggctggctggtttattgctgataaatctggagccggtgagcgtgggtctcgcggtatcattgcagcactggggccagatggtaagccctcccgtatcgtagttatctacacgacggggagtcaggcaactatggatgaacgaaatagacagatcgctgagataggtgcctcactgattaagcattggtaactgtcagaccaagtttactcataacgcgtcaattcgagggggatcaattccgtgataggtgggctgcccttcctggttggcttggtttcatcagccatccgcttgccctcatctgttacgccggcggtagccggccagcctcgcagagcaggattcccgttgagcaccgccaggtgcgaataagggacagtgaagaaggaacacccgctcgcgggtgggcctacttcacctatcctgcccggctgacgccgttggatacaccaaggaaagtctacacgaaccctttggcaaaatcctgtatatcgtgcgaaaaaggatggatataccgaaaaaatcgctataatgaccccgaagcagggttatgcagcggaaaacggaattgatccggccacgatgcgtccggcgtagaggatctgaagatcagcagttcaacctgttgatagtacgtactaagctctcatgtttcacgtactaagctctcatgtttaacgtactaagctctcatgtttaacgaactaaaccctcatggctaacgtactaagctctcatggctaacgtactaagctctcatgtttcacgtactaagctctcatgtttgaacaataaaattaatataaatcagcaacttaaatagcctctaaggttttaagttttataagaaaaaaaagaatatataaggcttttaaagcttttaag

SEQ ID NO: 67 - DNA, 9846 bp, synthetic construct
  misc_feature 1..9846: note = Description of sequence: pBH305
  source 1..9846: mol_type = other DNA
gatgtaacgcactgagaagcccttagagcctctcaaagcaattttgagtgacacaggaacacttaacggctgacatgggaattcccctccaccgcggtgtattaatgcggctgcccctcggttcctggccttttgctggccttttgctcacatgttctttcctgcgttatcccctgattctgtggataaccgtattaccgcctttgagtgagctgatacaacgcattggctgcaacaatcagccttgatctggaagaagcaatgaaagctgctgttaagtctccgaatcaggtattgttcctgacaggtgtattcccatccggtaaacgcggatactttgcagttgatctgactcaggaataaattataaattaaggtaagaagattgtaggataagctaatgaaatagaaaaaggatgccgtcacacaacttgtcggcattcttttttgttttattagttgaaaatatagtgaaaaagttgcctaaatatgtatgttaacaaattatttgtcgtaactttgcactccaaatctgtttttaacatatggcactagtgaaaccagtaacgttatacgatgtcgcagagtatgccggtgtctcttatcagaccgtttcccgcgtggtgaaccaggccagccacgtttctgcgaaaacgcgggaaaaagtggaagcggcgatggcggagctgaattacattcccaaccgcgtggcacaacaactggcgggcaaacagtcgttgctgattggcgttgccacctccagtctggccctgcacgcgccgtcgcaaattgtcgcggcgattaaatctcgcgccgatcaactgggtgccagcgtggtggtgtcgatggtagaacgaagcggcgtcgaagcctgtaaaacggcggtgcacaatcttctcgcgcaacgcgtcagtgggctgatcattaactatccgctggatgaccaggatgccattgctgtggaagctgcctgcactaatgttccggcgttatttcttgatgtctctgaccagacacccatcaacagtattattttctcccatgaagacggtacgcgactgggcgtggagcatctggtcgcattgggtcaccagcaaatcgcgctgttagcgggcccattaagttctgtctcggcgcgtctgcgtctggctggctggcataaatatctcactcgcaatcaaattcagccgatagcggaacgggaaggcgactggagtgccatgtccggttttcaacaaaccatgcaaatgctgaatgagggcatcgttcccactgcgatgctggttgccaacgatcagatggcgctgggcgcaatgcgcgccattaccgagtccgggctgcgcgttggtgcggatatctcggtagtgggatacgacgataccgaagacagctcatgttatatcccgccgttaaccaccatcaaacaggattttcgcctgctggggcaaaccagcgtggaccgcttgctgcaactctctcagggccaggcggtgaagggcaatcagctgttgcccgtctcactggtgaaaagaaaaaccaccctggcgcccaatacgcaaaccgcctctccccgcgcgttggccgattcattaatgcagctggcacgacaggtttcccgactggaaagcgggcagtgagctttcctcggtaccaaattccagaaaagaggcctcccgaaaggggggccttttttcgttttggtcctacttgtgcctgttctatttcctatgcggttcctggccttttgctggccttttgctcacatgttctttcctgcgttatcccctgattctgtggataaccgtattaccgcctttgagtgagctgatacatcccaaatgctgttccatcactggaagataggcaattagtagaagcaatttgattagtaatctaaaagcactccgataacgattagagtgcttttagattgtttatcattaattatcaaagcaagtgcagttcatcactgcccgctttccagtcgggaaacctgtcgtgccagctgcattaatgaatcggccaacgcgcggggagaggcggtttgcgtattgggcgccagggtggtttttcttttcaccagctaagccgaaccgcgttccatcagaatcggagtaagttgtaatcgttgttgctgaagggtcggctgggttatccgatggatgagtacatcaatcgccagctcccccagttcatctttcggttggtggatagtggttaatggtggcgtcataaagcttgccagttcgatatcgtcatagccaatcaccgcgatatcctgcggaacctgtaactctgcctgatataacgcctggtaaacgccaacagccatagcgtcatttccggtaaagacggcctgaggacgcagcggatgtgatagcagttggcgcatagcgtcaaacccgccgttaaattcaaaatcaccagtgacttcatagccatcaggaatgttgagacccgcacgtttcatcgccgcccgataaccttccaaccgcaggcgcgccggagttttatccagcgggccggtaatacaggcgatacgggtatgacctttatcgatcagatattgcgttgctaagtctccgcccagcaacgagttatcctgaataagatcgctgtcgccatcgaacggagcccagtccatcatcacagtaggcactgtcggataacgttgcatgatttcacgcgaaggttgatgcgtttcggtgcacagtaacagcaagccatcaacgcgtttttgcatcagcgtttccagattgcgattcatccgctgttcatcgccttcggtattgcaaaggacgagactataaccgcgttcgaagcagctgcgttcaacgccacgcaccagttctgaatagaaaggattggtactggcagtgatcaacatgccaatggtatgcgacgctttgcccgccagttgttgtgccacgcggttgggaatgtaattgagctccgccatcgccgcttccactttttcccgcgttttcgcagaaacgtggctggcctggttcaccacattggaaacggtctgatgagagacaccggcatactctgcgacatcgtataacgttactggtttcacgtttatattatttatatttgtttgacgagaatatctttatttaattgttatccgctcacaattgccgacaaaggtaattgttatccgctcacaattcaaataaatagatagaaaaataacagtttgtcgaattttctttgtacccgataattgcctatcttccagtgatggaacagcatttgtgcattggctgcaacaatcagccttacttgtgcctgttctatttccgaaccgaccgcttgtatgaatgcatcaaaattcgttttctctacgttggattccttgttgctcatattgtgatgataatttctacaaatatagtcattggtaactatctatgaaactgtttgatacttttatcagtctaatagttttacaaggtctttcttcatttcttcgtcaatatccctgtatcgtctgaaagctttgcttccctccttgtgtcccgacagtgcggaaacaaggttcgggtctttcacttttttatagatattgccgataaacgtacgtcttgccagatggctgcttgccacttcataaataggtcgtttgatttcgttgtgcgtcaacgggtctaagattgttacgatgcggtcaactccagctaatttgaatatcttttttatggcatcattgtacttttgctcggatatgaacggcaacagttttccctcatattctttgtagcgttcaaggatttctttcgctttgtcgttaagtggaacacgtaccgtaaccggattcccctctttggttttcttgggaatatattctatggcttcattgaccacatttagtttggtcattcggtacaggtcgctcaccctgcatcctatcagtgtctgaaatatgaatatatccctctgtattgccagttgtggggtggcagaaaggtctgcattaaaaatcctgtccctttcttcgagtgttatataataaggtgtaccatatgtacactcctctatcggaaacttgtcgaaaggtctgtttgtggtgcgtttgttatcgaagcaccacaggaagaatgtgcgtattcttgaaaaacagtctatcagcgtgtttttgcttctgggctgtggtgtcctcttttcgggaatggcttcataaatgctcgggtaaagttcataatactggtattcgttctgaaagaaatcccacatatcccgaagcgtgtcaggtgttaccaaatccacatcaaggataaagcccttttgtcctctctttgtagcccttacatatagttcataacgcagtaaggctcttttgacaacccggaaatttttctttcgtacttccgacaaagggtgcttgtttagaaattcatcgaatagttctccaatggtaggcttgataaccacttcctccggcaaaaaatatttttcaggatggtaaaatttatcaagtgttgtttttagccattctttgtctattgcttccttttcttgttgatataccttctcgatataggttttcaactggcgtatctcttcatttatatgggtacgcatttcttcattgcagacagctttcgtttttacacattcgtctttatcatcccatagattgggattgatggctaactgagtaggagcaacggagtctaactgccttccgtttctaaaacggacatagattgtagccatggattctgtatcatatcgtttggctgcttttttaatgataaaggttactttcatagactttcaggttgaattttactctgctgcaaatataaatattttccccagcattttccccacatctgctaaatattttgcaattcgattaaacttggattaaaatttaataggattataacatattgaaatacagtgtaattgtggcgtttttccgcatttttctttttacccacattttccccactttaattatttcaaatgcggggtctgggtacaagaaagaaagctaagtatttgatagttcaatacttagctttttcttttgcttgaattttccccacattttccccacacgtgcaaaaaatatagcagtaagtcattatttcttttggttgaacgtagagagtagcgatattaaaagaatccgatgagaaaagactaatatttatctatccattcagtttgatttttcaggactttacatcgtcctgaaagtatttgttggtaccggtaccgaggacgcgtaaacatttacagttgcatgtggcctattgtttaggacgcgttatctccttaacgtacgttttcgttccattggccctcaaaccccgttatatacattcatgtccatttatgtaaaaaatcctgctgaccttgtttatgtcttgtcagtcaccatttgcaaaaccatatttgaccctcaaagaggctgaatttgataagcaacttgctacatactcataataaggagctaaatagaacacgaatgggaaatactcaaatgccaaactaaagaagatattggccaaaataaacgctataccgagagagaaacttgatttttcaacttcctaaccaacagtgttgttcaaacatttctacttatttgtacttaccagttgaacctacgtttccctaataaaatgtctatggtaaaaagttaaaaaatcctcctacttttgttagatatatttttttgtgtaattttgtaatcgttatgcggcagtaataatatacatattaatacgagttaggaatcctgtagttctcatatgctacgaggaggtattaaaaggtgcgtttcgacaatgcatctattgtagtatattattgcttaatccaaatgaatattataaatttaggaattcttgctcacattgatgcaggaaaaacttccgtaaccgagaatctgctgtttgccagtggagcaacggaaaagtgcggctgtgtggataatggtgacaccataacggactctatggatatagagaaacgtagaggaattactgttcgggcttctacgacatctattatctggaatggtgtgaaatgcaatatcattgacactccgggacacatggattttattgcggaagtggagcggacattcaaaatgcttgatggagcagtcctcatcttatccgcaaaggaaggcatacaagcgcagacaaagttgctgttcaatactttacagaagctgcaaatcccgacaattatatttatcaataagattgaccgagccggtgtgaatttggagcgtttgtatctggatataaaagcaaatctgtctcaagatgtcctgtttatgcaaaatgttgtcgatggatcggtttatccggtttgctcccaaacatatataaaggaagaatacaaagaatttgtatgcaaccatgacgacaatatattagaacgatatttggcggatagcgaaatttcaccggctgattattggaatacgataatcgctcttgtggcaaaagccaaagtctatccggtgctacatggatcagcaatgttcaatatcggtatcaatgagttgttggacgccatcacttcttttatacttcctccggcatcggtctcaaacagactttcatcttatctttataagatagagcatgaccccaaaggacataaaagaagttttctaaaaataattgacggaagtctgagacttcgagacgttgtaagaatcaacgattcggaaaaattcatcaagattaaaaatctaaaaactatcaatcagggcagagagataaatgttgatgaagtgggcgccaatgatatcgcgattgtagaggatatggatgattttcgaatcggaaattatttaggtgctgaaccttgtttgattcaaggattatcgcatcagcatcccgctctcaaatcctccgtccggccagacaggcccgaagagagaagcaaggtgatatccgctctgaatacattgtggattgaagacccgtctttgtccttttccataaactcatatagtgatgaattggaaatctcgttatatggtttaacccaaaaggaaatcatacagacattgctggaagaacgattttccgtaaaggtccattttgatgagatcaagactatatacaaagaacgacctgtaaaaaaggtcaataagattattcagatcgaagtgccgcccaacccttattgggccacaatagggctgactcttgaacccttaccgttagggacagggttgcaaatcgaaagtgacatctcctatggttatctgaaccattcttttcaaaatgccgtttttgaagggattcgtatgtcttgccaatccgggttacatggatgggaagtgactgatctgaaagtaacttttactcaagccgagtattatagcccggtaagtacacctgctgatttcagacagctgaccccttatgtcttcaggctggccttgcaacagtcaggtgtggacattctcgaaccgatgctctattttgagttgcagataccccaagcggcaagttccaaagctattacagatttgcaaaaaatgatgtctgagattgaagacatcagttgcaataatgagtggtgtcatattaaagggaaagttccattaaatacaagtaaagactatgcatcagaagtaagttcatacactaagggcttaggcatttttatggttaagccatgcgggtatcaaataacaaaaggcggttattctgataatatccgcatgaacgaaaaagataaacttttattcatgttccaaaaatcaatgtcatcaaaataatggtataacctctccttaatttattgcatctcttttcgaatatttatgttttttgagaaaagaacgtactcatggttcatcccgatatgcgtatcggtctgtatatcagcaactttctatgtgtttcaactacaatagtcatctattctcatctttctgagtccaccccctgcaaagcccctctttacgacataaaaattcggtcggaaaaggtatgcaaaagatgtttctctctttaagagaaactcttcgggatgcaaaaatatgaaaataactccaattcaccaaattatatagcgacttttttacaaaatgctaaaatttgttgatttccgtcaagcaattgttgagcaaaaatgtcttttacgataaaatgatacctcaatatcaactgtttagcaaaacgatatttctcttaaagagagaaacacctttttgttcaccaatccccgacttttaatcccgcggccatgattgaaaaaggaagagtatgagtattcaacatttccgtgtcgcccttattcccttttttgcggcattttgccttcctgtttttgctcacccagaaacgctggtgaaagtaaaagatgctgaagatcagttgggtgcacgagtgggttacatcgaactggatctcaacagcggtaagatccttgagagttttcgccccgaagaacgttttccaatgatgagcacttttaaagttctgctatgtggcgcggtattatcccgtattgacgccgggcaagagcaactcggtcgccgcatacactattctcagaatgacttggttgagtactcaccagtcacagaaaagcatcttacggatggcatgacagtaagagaattatgcagtgctgccataaccatgagtgataacactgcggccaacttacttctgacaacgatcggaggaccgaaggagctaaccgcttttttgcacaacatgggggatcatgtaactcgccttgatcgttgggaaccggagctgaatgaagccataccaaacgacgagcgtgacaccacgatgcctgtagcaatggcaacaacgttgcgcaaactattaactggcgaactacttactctagcttcccggcaacaattaatagactggatggaggcggataaagttgcaggaccacttctgcgctcggcccttccggctggctggtttattgctgataaatctggagccggtgagcgtgggtcacgcggtatcattgcagcactggggccagatggtaagccctcccgtatcgtagttatctacacgacggggagtcaggcaactatggatgaacgaaatagacagatcgctgagataggtgcctcactgattaagcattggtaactgtcagaccaagtttactcataacgcgtcaattcgagggggatcaattccgtgataggtgggctgcccttcctggttggcttggtttcatcagccatccgcttgccctcatctgttacgccggcggtagccggccagcctcgcagagcaggattcccgttgagcaccgccaggtgcgaataagggacagtgaagaaggaacacccgctcgcgggtgggcctacttcacctatcctgcccggctgacgccgttggatacaccaaggaaagtctacacgaaccctttggcaaaatcctgtatatcgtgcgaaaaaggatggatataccgaaaaaatcgctataatgaccccgaagcagggttatgcagcggaaaacggaattgatccggccacgatgcgtccggcgtagaggatctgaagatcagcagttcaacctgttgatagtacgtactaagctctcatgtttcacgtactaagctctcatgtttaacgtactaagctctcatgtttaacgaactaaaccctcatggctaacgtactaagctctcatggctaacgtactaagctctcatgtttcacgtactaagctctcatgtttgaacaataaaattaatataaatcagcaacttaaatagcctctaaggttttaagttttataagaaaaaaaagaatatataaggcttttaaagcttttaaggtttaacggttgtggacaacaagccagg

SEQ ID NO: 68 - DNA, 9845 bp, synthetic construct
  misc_feature 1..9845: note = Description of sequence: pBH306
  source 1..9845: mol_type = other DNA
gatgtaacgcactgagaagcccttagagcctctcaaagcaattttgagtgacacaggaacacttaacggctgacatgggaattcccctccaccgcggtgtattaatgcggctgcccctcggttcctggccttttgctggccttttgctcacatgttctttcctgcgttatcccctgattctgtggataaccgtattaccgcctttgagtgagctgatacaacgcattggctgcaacaatcagccttgatctggaagaagcaatgaaagctgctgttaagtctccgaatcaggtattgttcctgacaggtgtattcccatccggtaaacgcggatactttgcagttgatctgactcaggaataaattataaattaaggtaagaagattgtaggataagctaatgaaatagaaaaaggatgccgtcacacaacttgtcggcattcttttttgttttattagttgaaaatatagtgaaaaagttgcctaaatatgtatgttaacaaattatttgtcgtaactttgcactccaaatctgtttttaacatatggcactagtgaaaccagtaacgttatacgatgtcgcagagtatgccggtgtctctaccgcgaccgtttccaacgtggtgaaccaggccagccacgtttctgcgaaaacgcgggaaaaagtggaagcggcgatggcggagctcaattacattcccaaccgcgtggcacaacaactggcgggcaaagcgtcgcataccattggcatgttgatcactgccagtaccaatcctttctattcagaactggtgcgtggcgttgaacgcagctgcttcgaacgcggttatagtctcgtcctttgcaataccgaaggcgatgaacagcggatgaatcgcaatctggaaacgctgatgcaaaaacgcgttgatggcttgctgttactgtgcaccgaaacgcatcaaccttcgcgtgaaatcatgcaacgttatccgacagtgcctactgtgatgatggactgggctccgttcgatggcgacagcgatcttattcaggataactcgttgctgggcggagacttagcaacgcaatatctgatcgataaaggtcatacccgtatcgcctgtattaccggcccgctggataaaactccggcgcgcctgcggttggaaggttatcgggcggcgatgaaacgtgcgggtctcaacattcctgatggctatgaagtcactggtgattttgaatttaacggcgggtttgacgctatgcgccaactgctatcacatccgctgcgtcctcaggccgtctttaccggaaatgacgctatggctgttggcgtttaccaggcgttatatcaggcagagttacaggttccgcaggatatcgcggtgattggctatgacgatatcgaactggcaagctttatgacgccaccattaaccactatccaccaaccgaaagatgaactgggggagctggcgattgatgtactcatccatcggataacccagccgacccttcagcaacaacgattacaacttactccgattctgatggaacgcggttcggcttagctggtgaaaagaaaaaccaccctggcgcccaatacgcaaaccgcctctccccgcgcgttggccgattcattaatgcagctggcacgacaggtttcccgactggaaagcgggcagtgagctttcctcggtaccaaattccagaaaagaggcctcccgaaaggggggccttttttcgttttggtcctacttgtgcctgttctatttcctatgcggttcctggccttttgctggccttttgctcacatgttctttcctgcgttatcccctgattctgtggataaccgtattaccgcctttgagtgagctgatacatcccaaatgctgttccatcactggaagataggcaattagtagaagcaatttgattagtaatctaaaagcactccgataacgattagagtgcttttagattgtttatcattaattatcaaagcaagtgcagttcatcactgcccgctttccagtcgggaaacctgtcgtgccagctgcattaatgaatcggccaacgcgcggggagaggcggtttgcgtattgggcgccagggtggtttttcttttcaccagtgagacgggcaacagctgattgcccttcaccgcctggccctgagagagttgcagcaagcggtccacgctggtttgccccagcaggcgaaaatcctgtttgatggtggttaacggcgggatataacatgagctgtcttcggtatcgtcgtatcccactaccgagatatccgcaccaacgcgcagcccggtctcggtaatggcgcgcattgcgcccagcgccatctgatcgttggcaaccagcatcgcagtgggaacgatgccctcattcagcatttgcatggtttgttgaaaaccggacatggcactccagtcgccttcccgttccgctatcggctgaatttgattgcgagtgagatatttatgccagccagccagacgcagacgcgccgagacagaacttaatgggcccgctaacagcgcgatttgctggtgacccaatgcgaccagatgctccacgcccagtcgcgtaccgtcttcatgggagaaaataatactgttgatgggtgtctggtcagagacatcaagaaataacgccggaacattagtgcaggcagcttccacagcaatggcatcctggttatccagcggatagttaatgatcagcccactgacgcgttgcgcgagaagattgtgcaccgccgttttacaggcttcgatgccgcttcgttctaccatcgacacgaacacgctggcacccagttgataggcgcgagatttaatcgccgcgacaatttgcgacagcgcgtgcagggccagactggaggtggcaacgccaatcagcaacgactgtttgcccgccagttgttgtgccacgcggttgggaatgtaattcagctccgccatcgccgcttccactttttcccgcgttttcgcagaaacgtggctggcctggttcaccacattggaaacggtctgatgagagacaccggcatactctgcgacatcgtataacgttactggtttcacgtttatattatttatatttgtttgacgagaatatctttatttaattttaagcgcttaaaattgccgacaaaggtaaattttaagcgcttaaaattcaaataaatagatagaaaaataacagtttgtcgaattttctttgtacccgataattgcctatcttccagtgatggaacagcatttgtgcattggctgcaacaatcagccttacttgtgcctgttctatttccgaaccgaccgcttgtatgaatgcatcaaaattcgttttctctacgttggattccttgttgctcatattgtgatgataatttctacaaatatagtcattggtaactatctatgaaactgtttgatacttttatcagtctaatagttttacaaggtctttcttcatttcttcgtcaatatccctgtatcgtctgaaagctttgcttccctccttgtgtcccgacagtgcggaaacaaggttcgggtctttcacttttttatagatattgccgataaacgtacgtcttgccagatggctgcttgccacttcataaataggtcgtttgatttcgttgtgcgtcaacgggtctaagattgttacgatgcggtcaactccagctaatttgaatatcttttttatggcatcattgtacttttgctcggatatgaacggcaacagttttccctcatattctttgtagcgttcaaggatttctttcgctttgtcgttaagtggaacacgtaccgtaaccggattcccctctttggttttcttgggaatatattctatggcttcattgaccacatttagtttggtcattcggtacaggtcgctcaccctgcatcctatcagtgtctgaaatatgaatatatccctctgtattgccagttgtggggtggcagaaaggtctgcattaaaaatcctgtccctttcttcgagtgttatataataaggtgtaccatatgtacactcctctatcggaaacttgtcgaaaggtctgtttgtggtgcgtttgttatcgaagcaccacaggaagaatgtgcgtattcttgaaaaacagtctatcagcgtgtttttgcttctgggctgtggtgtcctcttttcgggaatggcttcataaatgctcgggtaaagttcataatactggtattcgttctgaaagaaatcccacatatcccgaagcgtgtcaggtgttaccaaatccacatcaaggataaagcccttttgtcctctctttgtagcccttacatatagttcataacgcagtaaggctcttttgacaacccggaaatttttctttcgtacttccgacaaagggtgcttgtttagaaattcatcgaatagttctccaatggtaggcttgataaccacttcctccggcaaaaaatatttttcaggatggtaaaatttatcaagtgttgtttttagccattctttgtctattgcttccttttcttgttgatataccttctcgatataggttttcaactggcgtatctcttcatttatatgggtacgcatttcttcattgcagacagctttcgtttttacacattcgtctttatcatcccatagattgggattgatggctaactgagtaggagcaacggagtctaactgccttccgtttctaaaacggacatagattgtagccatggattctgtatcatatcgtttggctgcttttttaatgataaaggttactttcatagactttcaggttgaattttactctgctgcaaatataaatattttccccagcattttccccacatctgctaaatattttgcaattcgattaaacttggattaaaatttaataggattataacatattgaaatacagtgtaattgtggcgtttttccgcatttttctttttacccacattttccccactttaattatttcaaatgcggggtctgggtacaagaaagaaagctaagtatttgatagttcaatacttagctttttcttttgcttgaattttccccacattttccccacacgtgcaaaaaatatagcagtaagtcattatttcttttggttgaacgtagagagtagcgatattaaaagaatccgatgagaaaagactaatatttatctatccattcagtttgatttttcaggactttacatcgtcctgaaagtatttgttggtaccggtaccgaggacgcgtaaacatttacagttgcatgtggcctattgtttaggacgcgttatctccttaacgtacgttttcgttccattggccctcaaaccccgttatatacattcatgtccatttatgtaaaaaatcctgctgaccttgtttatgtcttgtcagtcaccatttgcaaaaccatatttgaccctcaaagaggctgaatttgataagcaacttgctacatactcataataaggagctaaatagaacacgaatgggaaatactcaaatgccaaactaaagaagatattggccaaaataaacgctataccgagagagaaacttgatttttcaacttcctaaccaacagtgttgttcaaacatttctacttatttgtacttaccagttgaacctacgtttccctaataaaatgtctatggtaaaaagttaaaaaatcctcctacttttgttagatatatttttttgtgtaattttgtaatcgttatgcggcagtaataatatacatattaatacgagttaggaatcctgtagttctcatatgctacgaggaggtattaaaaggtgcgtttcgacaatgcatctattgtagtatattattgcttaatccaaatgaatattataaatttaggaattcttgctcacattgatgcaggaaaaacttccgtaaccgagaatctgctgtttgccagtggagcaacggaaaagtgcggctgtgtggataatggtgacaccataacggactctatggatatagagaaacgtagaggaattactgttcgggcttctacgacatctattatctggaatggtgtgaaatgcaatatcattgacactccgggacacatggattttattgcggaagtggagcggacattcaaaatgcttgatggagcagtcctcatcttatccgcaaaggaaggcatacaagcgcagacaaagttgctgttcaatactttacagaagctgcaaatcccgacaattatatttatcaataagattgaccgagccggtgtgaatttggagcgtttgtatctggatataaaagcaaatctgtctcaagatgtcctgtttatgcaaaatgttgtcgatggatcggtttatccggtttgctcccaaacatatataaaggaagaatacaaagaatttgtatgcaaccatgacgacaatatattagaacgatatttggcggatagcgaaatttcaccggctgattattggaatacgataatcgctcttgtggcaaaagccaaagtctatccggtgctacatggatcagcaatgttcaatatcggtatcaatgagttgttggacgccatcacttcttttatacttcctccggcatcggtctcaaacagactttcatcttatctttataagatagagcatgaccccaaaggacataaaagaagttttctaaaaataattgacggaagtctgagacttcgagacgttgtaagaatcaacgattcggaaaaattcatcaagattaaaaatctaaaaactatcaatcagggcagagagataaatgttgatgaagtgggcgccaatgatatcgcgattgtagaggatatggatgattttcgaatcggaaattatttaggtgctgaaccttgtttgattcaaggattatcgcatcagcatcccgctctcaaatcctccgtccggccagacaggcccgaagagagaagcaaggtgatatccgctctgaatacattgtggattgaagacccgtctttgtccttttccataaactcatatagtgatgaattggaaatctcgttatatggtttaacccaaaaggaaatcatacagacattgctggaagaacgattttccgtaaaggtccattttgatgagatcaagactatatacaaagaacgacctgtaaaaaaggtcaataagattattcagatcgaagtgccgcccaacccttattgggccacaatagggctgactcttgaacccttaccgttagggacagggttgcaaatcgaaagtgacatctcctatggttatctgaaccattcttttcaaaatgccgtttttgaagggattcgtatgtcttgccaatccgggttacatggatgggaagtgactgatctgaaagtaacttttactcaagccgagtattatagcccggtaagtacacctgctgatttcagacagctgaccccttatgtcttcaggctggccttgcaacagtcaggtgtggacattctcgaaccgatgctctattttgagttgcagataccccaagcggcaagttccaaagctattacagatttgcaaaaaatgatgtctgagattgaagacatcagttgcaataatgagtggtgtcatattaaagggaaagttccattaaatacaagtaaagactatgcatcagaagtaagttcatacactaagggcttaggcatttttatggttaagccatgcgggtatcaaataacaaaaggcggttattctgataatatccgcatgaacgaaaaagataaacttttattcatgttccaaaaatcaatgtcatcaaaataatggtataacctctccttaatttattgcatctcttttcgaatatttatgttttttgagaaaagaacgtactcatggttcatcccgatatgcgtatcggtctgtatatcagcaactttctatgtgtttcaactacaatagtcatctattctcatctttctgagtccaccccctgcaaagcccctctttacgacataaaaattcggtcggaaaaggtatgcaaaagatgtttctctctttaagagaaactcttcgggatgcaaaaatatgaaaataactccaattcaccaaattatatagcgacttttttacaaaatgctaaaatttgttgatttccgtcaagcaattgttgagcaaaaatgtcttttacgataaaatgatacctcaatatcaactgtttagcaaaacgatatttctcttaaagagagaaacacctttttgttcaccaatccccgacttttaatcccgcggccatgattgaaaaaggaagagtatgagtattcaacatttccgtgtcgcccttattcccttttttgcggcattttgccttcctgtttttgctcacccagaaacgctggtgaaagtaaaagatgctgaagatcagttgggtgcacgagtgggttacatcgaactggatctcaacagcggtaagatccttgagagttttcgccccgaagaacgttttccaatgatgagcacttttaaagttctgctatgtggcgcggtattatcccgtattgacgccgggcaagagcaactcggtcgccgcatacactattctcagaatgacttggttgagtactcaccagtcacagaaaagcatcttacggatggcatgacagtaagagaattatgcagtgctgccataaccatgagtgataacactgcggccaacttacttctgacaacgatcggaggaccgaaggagctaaccgcttttttgcacaacatgggggatcatgtaactcgccttgatcgttgggaaccggagctgaatgaagccataccaaacgacgagcgtgacaccacgatgcctgtagcaatggcaacaacgttgcgcaaactattaactggcgaactacttactctagcttcccggcaacaattaatagactggatggaggcggataaagttgcaggaccacttctgcgctcggcccttccggctggctggtttattgctgataaatctggagccggtgagcgtgggtcacgcggtatcattgcagcactggggccagatggtaagccctcccgtatcgtagttatctacacgacggggagtcaggcaactatggatgaacgaaatagacagatcgctgagataggtgcctcactgattaagcattggtaactgtcagaccaagtttactcataacgcgtcaattcgagggggatcaattccgtgataggtgggctgcccttcctggttggcttggtttcatcagccatccgcttgccctcatctgttacgccggcggtagccggccagcctcgcagagcaggattcccgttgagcaccgccaggtgcgaataagggacagtgaagaaggaacacccgctcgcgggtgggcctacttcacctatcctgcccggctgacgccgttggatacaccaaggaaagtctacacgaaccctttggcaaaatcctgtatatcgtgcgaaaaaggatggatataccgaaaaaatcgctataatgaccccgaagcagggttatgcagcggaaaacggaattgatccggccacgatgcgtccggcgtagaggatctgaagatcagcagttcaacctgttgatagtacgtactaagctctcatgtttcacgtactaagctctcatgtttaacgtactaagctctcatgtttaacgaactaaaccctcatggctaacgtactaagctctcatggctaacgtactaagctctcatgtttcacgtactaagctctcatgtttgaacaataaaattaatataaatcagcaacttaaatagcctctaaggttttaagttttataagaaaaaaaagaatatataaggcttttaaagcttttaaggtttaacggttgtggacaacaagccagg

SEQ ID NO: 69 - DNA, 11197 bp, synthetic construct
  misc_feature 1..11197: note = Description of sequence: pBH501
  source 1..11197: mol_type = other DNA
gatgtaacgcactgagaagcccttagagcctctcaaagcaattttgagtgacacaggaacacttaacggctgacatgggaattcccctccaccgcggtgtattaatgcggctgcccctgcacctgggtagctcaatgcgcgcaataaaaaagcccccggaaggtgatcttccgggggctttctcatgcgttggtgttcactcccattctatgcggttcctggccttttgctggccttttgctcacatgttctttcctgcgttatcccctgattctgtggataaccgtattaccgcctttgagtgagctgatacatcccaaatgctgctcggtaccaaagacgaacaataagacgctgaaaagcgtcttttttcgttttggtccgataaagtttggaagataaagctaaaagttcttatctttgcagtccgaaataaagacatataaaagaaaagacaccatggataagaaatactcaataggcttagctatcggcacaaatagcgtcggatgggcggtgatcactgatgaatataaggttccgtctaaaaagttcaaggttctgggaaatacagaccgccacagtatcaaaaaaaatcttataggggctcttttatttgacagtggagagacagcggaagcgactcgtctcaaacggacagctcgtagaaggtatacacgtcggaagaatcgtatttgttatctacaggagattttttcaaatgagatggcgaaagtagatgatagtttctttcatcgacttgaagagtcttttttggtggaagaagacaagaagcatgaacgtcatcctatttttggaaatatagtagatgaagttgcttatcatgagaaatatccaactatctatcatctgcgaaaaaaattggtagattctactgataaagcggatttgcgcttaatctatttggccttagcgcatatgattaagtttcgtggtcattttttgattgagggagatttaaatcctgataatagtgatgtggacaaactatttatccagttggtacaaacctacaatcaattatttgaagaaaaccctattaacgcaagtggagtagatgctaaagcgattctttctgcacgattgagtaaatcaagacgattagaaaatctcattgctcagctccccggtgagaagaaaaatggcttatttgggaatctcattgctttgtcattgggtttgacccctaattttaaatcaaattttgatttggcagaagatgctaaattacagctttcaaaagatacttacgatgatgatttagataatttattggcgcaaattggagatcaatatgctgatttgtttttggcagctaagaatttatcagatgctattttactttcagatatcctaagagtaaatactgaaataactaaggctcccctatcagcttcaatgattaaacgctacgatgaacatcatcaagacttgactcttttaaaagctttagttcgacaacaacttccagaaaagtataaagaaatcttttttgatcaatcaaaaaacggatatgcaggttatattgatgggggagctagccaagaagaattttataaatttatcaaaccaattttagaaaaaatggatggtactgaggaattattggtgaaactaaatcgtgaagatttgctgcgcaagcaacggacctttgacaacggctctattccccatcaaattcacttgggtgagctgcatgctattttgagaagacaagaagacttttatccatttttaaaagacaatcgtgagaagattgaaaaaatcttgacttttcgaattccttattatgttggtccattggcgcgtggcaatagtcgttttgcatggatgactcggaagtctgaagaaacaattaccccatggaattttgaagaagttgtcgataaaggtgcttcagctcaatcatttattgaacgcatgacaaactttgataaaaatcttccaaatgaaaaagtactaccaaaacatagtttgctttatgagtattttacggtttataacgaattgacaaaggtcaaatatgttactgaaggaatgcgaaaaccagcatttctttcaggtgaacagaagaaagccattgttgatttactcttcaaaacaaatcgaaaagtaaccgttaagcaattaaaagaagattatttcaaaaaaatagaatgttttgatagtgttgaaatttcaggagttgaagatagatttaatgcttcattaggtacctaccatgatttgctaaaaattattaaagataaagattttttggataatgaagaaaatgaagatatcttagaggatattgttttaacattgaccttatttgaagatagggagatgattgaggaaagacttaaaacatatgctcacctctttgatgataaggtgatgaaacagcttaaacgtcgccgttatactggttggggacgtttgtctcgaaaattgattaatggtattagggataagcaatctggcaaaacaatattagattttttgaaatcagatggttttgccaatcgcaattttatgcagctgatccatgatgatagtttgacatttaaagaagacattcaaaaagcacaagtgtctggacaaggcgatagtttacatgaacatattgcaaatttagctggtagccctgctattaaaaaaggtattttacagactgtaaaagttgttgatgaattggtcaaagtaatggggcggcataagccagaaaatatcgttattgaaatggcacgtgaaaatcagacaactcaaaagggccagaaaaattcgcgagagcgtatgaaacgaatcgaagaaggtatcaaagaattaggaagtcagattcttaaagagcatcctgttgaaaatactcaattgcaaaatgaaaagctctatctctattatctccaaaatggaagagacatgtatgtggaccaagaattagatattaatcgtttaagtgattatgatgtcgatgccattgttccacaaagtttccttaaagacgattcaatagacaataaggtcttaacgcgttctgataaaaatcgtggtaaatcggataacgttccaagtgaagaagtagtcaaaaagatgaaaaactattggagacaacttctaaacgccaagttaatcactcaacgtaagtttgataatttaacgaaagctgaacgtggtggtttgagtgaacttgataaagctggttttatcaaacgccaattggttgaaactcgccaaatcactaagcatgtggcacaaattttggatagtcgcatgaatactaaatacgatgaaaatgataaacttattcgagaggttaaagtgattaccttaaaatctaaattagtttctgacttccgaaaagatttccaattctataaagtacgtgagattaacaattaccatcatgcccatgatgcgtatctaaatgccgtcgttggaactgctttgattaagaaatatccaaaacttgaatcggagtttgtctatggtgattataaagtttatgatgttcgtaaaatgattgctaagtctgagcaagaaataggcaaagcaaccgcaaaatatttcttttactctaatatcatgaacttcttcaaaacagaaattacacttgcaaatggagagattcgcaaacgccctctaatcgaaactaatggggaaactggagaaattgtctgggataaagggcgagattttgccacagtgcgcaaagtattgtccatgccccaagtcaatattgtcaagaaaacagaagtacagacaggcgaattctccaaggagtcaattttaccaaaaagaaattcggacaagcttattgctcgtaaaaaagactgggatccaaaaaaatatggtggttttgatagtccaacggtagcttattcagtcctagtggttgctaaggtggaaaaagggaaatcgaagaagttaaaatccgttaaagagttactagggatcacaattatggaaagaagttcctttgaaaaaaatccgattgactttttagaagctaaaggatataaggaagttaaaaaagacttaatcattaaactacctaaatatagtctttttgagttagaaaacggtcgtaaacggatgctggctagtgccggagaattacaaaaaggaaatgagctggctctgccaagcaaatatgtgaattttttatatttagctagtcattatgaaaagttgaagggtagtccagaagataacgaacaaaaacaattgtttgtggagcagcataagcattatttagatgagattattgagcaaatcagtgaattttctaagcgtgttattttagcagatgccaatttagataaagttcttagtgcatataacaaacatagagacaaaccaatacgtgaacaagcagaaaatattattcatttatttacgttgacgaatcttggagctcccgctgcttttaaatattttgatacaacaattgatcgtaaacgatatacgtctacaaaagaagttttagatgccactcttatccatcaatccatcactggtctttatgaaacacgcattgatttgagtcagctaggaggtgactgattctttgtacccgataattgcctatcttccagtgatggaacagcatttgtgcattggctgcaacaatcagccttacttgtgcctgttctatttccgaaccgaccgcttgtatgaatgcatcaaaattcgttttctctacgttggattccttgttgctcatattgtgatgataatttctacaaatatagtcattggtaactatctatgaaactgtttgatacttttatcagtctaatagttttacaaggtctttcttcatttcttcgtcaatatccctgtatcgtctgaaagctttgcttccctccttgtgtcccgacagtgcggaaacaaggttcgggtctttcacttttttatagatattgccgataaacgtacgtcttgccagatggctgcttgccacttcataaataggtcgtttgatttcgttgtgcgtcaacgggtctaagattgttacgatgcggtcaactccagctaatttgaatatcttttttatggcatcattgtacttttgctcggatatgaacggcaacagttttccctcatattctttgtagcgttcaaggatttctttcgctttgtcgttaagtggaacacgtaccgtaaccggattcccctctttggttttcttgggaatatattctatggcttcattgaccacatttagtttggtcattcggtacaggtcgctcaccctgcatcctatcagtgtctgaaatatgaatatatccctctgtattgccagttgtggggtggcagaaaggtctgcattaaaaatcctgtccctttcttcgagtgttatataataaggtgtaccatatgtacactcctctatcggaaacttgtcgaaaggtctgtttgtggtgcgtttgttatcgaagcaccacaggaagaatgtgcgtattcttgaaaaacagtctatcagcgtgtttttgcttctgggctgtggtgtcctcttttcgggaatggcttcataaatgctcgggtaaagttcataatactggtattcgttctgaaagaaatcccacatatcccgaagcgtgtcaggtgttaccaaatccacatcaaggataaagcccttttgtcctctctttgtagcccttacatatagttcataacgcagtaaggctcttttgacaacccggaaatttttctttcgtacttccgacaaagggtgcttgtttagaaattcatcgaatagttctccaatggtaggcttgataaccacttcctccggcaaaaaatatttttcaggatggtaaaatttatcaagtgttgtttttagccattctttgtctattgcttccttttcttgttgatataccttctcgatataggttttcaactggcgtatctcttcatttatatgggtacgcatttcttcattgcagacagctttcgtttttacacattcgtctttatcatcccatagattgggattgatggctaactgagtaggagcaacggagtctaactgccttccgtttctaaaacggacatagattgtagccatggattctgtatcatatcgtttggctgcttttttaatgataaaggttactttcatagactttcaggttgaattttactctgctgcaaatataaatattttccccagcattttccccacatctgctaaatattttgcaattcgattaaacttggattaaaatttaataggattataacatattgaaatacagtgtaattgtggcgtttttccgcatttttctttttacccacattttccccactttaattatttcaaatgcggggtctgggtacaagaaagaaagctaagtatttgatagttcaatacttagctttttcttttgcttgaattttccccacattttccccacacgtgcaaaaaatatagcagtaagtcattatttcttttggttgaacgtagagagtagcgatattaaaagaatccgatgagaaaagactaatatttatctatccattcagtttgatttttcaggactttacatcgtcctgaaagtatttgttggtaccggtaccgaggacgcgtaaacatttacagttgcatgtggcctattgtttaggacgcgttatctccttaacgtacgttttcgttccattggccctcaaaccccgttatatacattcatgtccatttatgtaaaaaatcctgctgaccttgtttatgtcttgtcagtcaccatttgcaaaaccatatttgaccctcaaagaggctgaatttgataagcaacttgctacatactcataataaggagctaaatagaacacgaatgggaaatactcaaatgccaaactaaagaagatattggccaaaataaacgctataccgagagagaaacttgatttttcaacttcctaaccaacagtgttgttcaaacatttctacttatttgtacttaccagttgaacctacgtttccctaataaaatgtctatggtaaaaagttaaaaaatcctcctacttttgttagatatatttttttgtgtaattttgtaatcgttatgcggcagtaataatatacatattaatacgagttaggaatcctgtagttctcatatgctacgaggaggtattaaaaggtgcgtttcgacaatgcatctattgtagtatattattgcttaatccaaatgaatattataaatttaggaattcttgctcacattgatgcaggaaaaacttccgtaaccgagaatctgctgtttgccagtggagcaacggaaaagtgcggctgtgtggataatggtgacaccataacggactctatggatatagagaaacgtagaggaattactgttcgggcttctacgacatctattatctggaatggtgtgaaatgcaatatcattgacactccgggacacatggattttattgcggaagtggagcggacattcaaaatgcttgatggagcagtcctcatcttatccgcaaaggaaggcatacaagcgcagacaaagttgctgttcaatactttacagaagctgcaaatcccgacaattatatttatcaataagattgaccgagccggtgtgaatttggagcgtttgtatctggatataaaagcaaatctgtctcaagatgtcctgtttatgcaaaatgttgtcgatggatcggtttatccggtttgctcccaaacatatataaaggaagaatacaaagaatttgtatgcaaccatgacgacaatatattagaacgatatttggcggatagcgaaatttcaccggctgattattggaatacgataatcgctcttgtggcaaaagccaaagtctatccggtgctacatggatcagcaatgttcaatatcggtatcaatgagttgttggacgccatcacttcttttatacttcctccggcatcggtctcaaacagactttcatcttatctttataagatagagcatgaccccaaaggacataaaagaagttttctaaaaataattgacggaagtctgagacttcgagacgttgtaagaatcaacgattcggaaaaattcatcaagattaaaaatctaaaaactatcaatcagggcagagagataaatgttgatgaagtgggcgccaatgatatcgcgattgtagaggatatggatgattttcgaatcggaaattatttaggtgctgaaccttgtttgattcaaggattatcgcatcagcatcccgctctcaaatcctccgtccggccagacaggcccgaagagagaagcaaggtgatatccgctctgaatacattgtggattgaagacccgtctttgtccttttccataaactcatatagtgatgaattggaaatctcgttatatggtttaacccaaaaggaaatcatacagacattgctggaagaacgattttccgtaaaggtccattttgatgagatcaagactatatacaaagaacgacctgtaaaaaaggtcaataagattattcagatcgaagtgccgcccaacccttattgggccacaatagggctgactcttgaacccttaccgttagggacagggttgcaaatcgaaagtgacatctcctatggttatctgaaccattcttttcaaaatgccgtttttgaagggattcgtatgtcttgccaatccgggttacatggatgggaagtgactgatctgaaagtaacttttactcaagccgagtattatagcccggtaagtacacctgctgatttcagacagctgaccccttatgtcttcaggctggccttgcaacagtcaggtgtggacattctcgaaccgatgctctattttgagttgcagataccccaagcggcaagttccaaagctattacagatttgcaaaaaatgatgtctgagattgaagacatcagttgcaataatgagtggtgtcatattaaagggaaagttccattaaatacaagtaaagactatgcatcagaagtaagttcatacactaagggcttaggcatttttatggttaagccatgcgggtatcaaataacaaaaggcggttattctgataatatccgcatgaacgaaaaagataaacttttattcatgttccaaaaatcaatgtcatcaaaataatggtataacctctccttaatttattgcatctcttttcgaatatttatgttttttgagaaaagaacgtactcatggttcatcccgatatgcgtatcggtctgtatatcagcaactttctatgtgtttcaactacaatagtcatctattctcatctttctgagtccaccccctgcaaagcccctctttacgacataaaaattcggtcggaaaaggtatgcaaaagatgtttctctctttaagagaaactcttcgggatgcaaaaatatgaaaataactccaattcaccaaattatatagcgacttttttacaaaatgctaaaatttgttgatttccgtcaagcaattgttgagcaaaaatgtcttttacgataaaatgatacctcaatatcaactgtttagcaaaacgatatttctcttaaagagagaaacacctttttgttcaccaatccccgacttttaatcccgcggccatgattgaaaaaggaagagtatgagtattcaacatttccgtgtcgcccttattcccttttttgcggcattttgccttcctgtttttgctcacccagaaacgctggtgaaagtaaaagatgctgaagatcagttgggtgcacgagtgggttacatcgaactggatctcaacagcggtaagatccttgagagttttcgccccgaagaacgttttccaatgatgagcacttttaaagttctgctatgtggcgcggtattatcccgtattgacgccgggcaagagcaactcggtcgccgcatacactattctcagaatgacttggttgagtactcaccagtcacagaaaagcatcttacggatggcatgacagtaagagaattatgcagtgctgccataaccatgagtgataacactgcggccaacttacttctgacaacgatcggaggaccgaaggagctaaccgcttttttgcacaacatgggggatcatgtaactcgccttgatcgttgggaaccggagctgaatgaagccataccaaacgacgagcgtgacaccacgatgcctgtagcaatggcaacaacgttgcgcaaactattaactggcgaactacttactctagcttcccggcaacaattaatagactggatggaggcggataaagttgcaggaccacttctgcgctcggcccttccggctggctggtttattgctgataaatctggagccggtgagcgtgggtcacgcggtatcattgcagcactggggccagatggtaagccctcccgtatcgtagttatctacacgacggggagtcaggcaactatggatgaacgaaatagacagatcgctgagataggtgcctcactgattaagcattggtaactgtcagaccaagtttactcataacgcgtcaattcgagggggatcaattccgtgataggtgggctgcccttcctggttggcttggtttcatcagccatccgcttgccctcatctgttacgccggcggtagccggccagcctcgcagagcaggattcccgttgagcaccgccaggtgcgaataagggacagtgaagaaggaacacccgctcgcgggtgggcctacttcacctatcctgcccggctgacgccgttggatacaccaaggaaagtctacacgaaccctttggcaaaatcctgtatatcgtgcgaaaaaggatggatataccgaaaaaatcgctataatgaccccgaagcagggttatgcagcggaaaacggaattgatccggccacgatgcgtccggcgtagaggatctgaagatcagcagttcaacctgttgatagtacgtactaagctctcatgtttcacgtactaagctctcatgtttaacgtactaagctctcatgtttaacgaactaaaccctcatggctaacgtactaagctctcatggctaacgtactaagctctcatgtttcacgtactaagctctcatgtttgaacaataaaattaatataaatcagcaacttaaatagcctctaaggttttaagttttataagaaaaaaaagaatatataaggcttttaaagcttttaaggtttaacggttgtggacaacaagccagg

SEQ ID NO: 70 - DNA, 7579 bp, synthetic construct
  misc_feature 1..7579: note = Description of sequence: pBH502
  source 1..7579: mol_type = other DNA
gtttaacggttgtggacaacaagccagggatgtaacgcactgagaagcccttagagcctctcaaagcaattttgagtgacacaggaacacttaacggctgacatgggaattcccctccaccgcggtggccctgtacaaagaaaattcgacaaactgttatttttctatctatttatttgaattgtgagcggataacaattacctttgtcggcaattgtgagcggataacaattatgatctgtcctgatgagtccgtgaggacgaaacgagtaagctcgtcgacagaacgatgcgctgaatgttttagagctagaaatagcaagttaaaataaggctagtccgttatcaacttgaaaaagtggcaccgagtcggtgcttttttggccggcatggtcccagcctcctcgctggcgccggctgggcaacatgcttcggcatggcgaatgggacgcactctaatcgttatcggagtgcttttagattactaatcaaattgcttctactaattgcctatcttccagtgatggaacagcatttgaacgcattggctgcaacaatcagccttgatctggaagaagcaatgaaagctgctgttaagtctccgaatcaggtattgttcctgacaggtgtattcccatccggtaaacgcggatactttgcagttgatctgactcaggaataaattataaattaaggtaagaagattgtaggataagctaatgaaatagaaaaaggatgccgtcacacaacttgtcggcattcttttttgttttattagttgaaaatatagtgaaaaagttgcctaaatatgtatgttaacaaattatttgtcgtaactttgcactccaaatctgtttttaacatatggcactagtgaaaccagtaacgttatacgatgtcgcagagtatgccggtgtctcttatcagaccgtttcccgcgtggtgaaccaggccagccacgtttctgcgaaaacgcgggaaaaagtggaagcggcgatggcggagctgaattacattcccaaccgcgtggcacaacaactggcgggcaaacagtcgttgctgattggcgttgccacctccagtctggccctgcacgcgccgtcgcaaattgtcgcggcgattaaatctcgcgccgatcaactgggtgccagcgtggtggtgtcgatggtagaacgaagcggcgtcgaagcctgtaaaacggcggtgcacaatcttctcgcgcaacgcgtcagtgggctgatcattaactatccgctggatgaccaggatgccattgctgtggaagctgcctgcactaatgttccggcgttatttcttgatgtctctgaccagacacccatcaacagtattattttctcccatgaagacggtacgcgactgggcgtggagcatctggtcgcattgggtcaccagcaaatcgcgctgttagcgggcccattaagttctgtctcggcgcgtctgcgtctggctggctggcataaatatctcactcgcaatcaaattcagccgatagcggaacgggaaggcgactggagtgccatgtccggttttcaacaaaccatgcaaatgctgaatgagggcatcgttcccactgcgatgctggttgccaacgatcagatggcgctgggcgcaatgcgcgccattaccgagtccgggctgcgcgttggtgcggatatctcggtagtgggatacgacgataccgaagacagctcatgttatatcccgccgttaaccaccatcaaacaggattttcgcctgctggggcaaaccagcgtggaccgcttgctgcaactctctcagggccaggcggtgaagggcaatcagctgttgcccgtctcactggtgaaaagaaaaaccaccctggcgcccaatacgcaaaccgcctctccccgcgcgttggccgattcattaatgcagctggcacgacaggtttcccgactggaaagcgggcagtgagctttcctcggtaccaaattccagaaaagaggcctcccgaaaggggggccttttttcgttttggtcctacttgtgcctgttctatttcctatgcggttcctggccttttgctggccttttgctcacatgttctttcctgcgttatcccctgattctgtggataaccgtattaccgcctttgagtgagctgatacatcccaaatgctgttccatcactggaagataggcaattagtagaagcaatttgattagtaatctaaaagcactccgataacgattagagtgcttttagattgtttatcattaattatcaaagcaagtgcagttcattatgccaggatgcgctcgcacagacgccaacccgtgacaccgttgatggtcacgcggaacagcaggctgccgtccgggttaatcagacgctcgtcaataatcttattgccattccacagggtaccggtgacggtgatctttttaccgtcaaaaacggcaatgccttcatacggacggccgaaatagtcaatcatattcggggtcacaccatcaatcaccagcgtaccgtaatgcaagataaccttgaagtggtgatcgtcaactgggtagacgactttaaagattttctcgatttgacccatttggtcaccgctcaggccttcgtacgggatgatcacatgaatatcaattttcagaccgttctcgccggacagaacgatgcgctgaatcggcgtcacgctcacacccaggttctggaacagagagcttacgccaccctgttccaggacttgatccaaattataacccgcggtctgacgccaatcgccaacaaaatcttccagagtaaaaaccatgtttatattatttatatttgtttgacgagaatatctttatttgccgacaaaggtacataactaaagtttcccacccaaataaatagatagaaaaataacagtttgtcgaattttctttgtacccgatacttgtgcctgttctatttccgaaccgaccgcttgtatgaatccatcaaaattcgttttctctatgttggattccttgttgctcatattgtgatgataatttctacaaatatagtcattggtaactatctatgaaactgtttgatacttttatagttgattaaacttgttcatggcatttgccttaatatcatccgctatgtcaatgtagggtttcatagctttgtagtcgctgtgtcccgtccatttcatgaccacctgtgccgggattccgagagccagcgcattgcagatgaatgtccttcttcctgcatgggtactgagcaaagcgtatttgggtgtgacttcatcaatacgttcatttcccttgtagtaggtttcccgtacaggctcgttgatttctgccagttcgcccagctctttcaggtaatcgttcatcttctggttgctgatgacgggcagagccatgtaattctcgaaatggatgtccttgtatttgtccagtatggctttgctgtatttgttcagttcaatcgtcaggctgtcggcagtcttgactgtggttatttcgatgtggtcggacttcacatcgcttcttttcagattgcgaacatccgaataccgcaaactcgtaaagcagcagaacaggaaaacatcacgcacacgttccaggtattgcttatccttgggtatctggtagtctttcagcttgttcagttcatcccaagtcaggaagattacttttttcgaggtggttttcagtttcggtttgaacgtatcgtatgcaatgttctgatgatgtcctttcctgaagctccagcgcaggaaccatttgaggaatcccatttgcttgccgatggtgctgtttctcatatccttggtgtcacgcaggaagttgacgtattcgttcaatccaaactcgttgaaatagttgaacgttgcatcctccttgaactctttgaggtggttcctcactgctgcaaatttttcataggtggatgccgtccagttattctggttaccgcactcttttacaaactcatcgaacacctcccaaaagctgacaggggcttcttccggctgttcttcactggtgtctttcattctcatgttgaaagcttccttcaactgttgggtcgttggcatgacctcctgcacctcaaattccttgaaaatattctggatttcggcatagtatttcagcaagtccgtattgatttcggctgcactttgctttagcttgttggtacatccgttctttacccgctgcttatctacatcccatttggctacgtcaatccggtagcccgttgtaaactcgatacgttggctggcaaagatgacacgcatacggatgggtacgttctctacgattggcacaccgttctttttccggctctccaatgcaaaaatgatgttgcgcttgatattcataattgggtgcgtttgaaattctacacccaaatatacacccaattattgagatagcaaaagacatttagaaacatttacttttactctatattgtaatttacacttgattatcagtcgtttgcagttttatgatattctgtgaaagtataagttcgagagcctgtctctccgcaaaaaacgctgaaaatcagcagattgcaaaacaaacaccctgttttacacccaagaatgtaaagtcggctgtttttgttttatttaagataatacaaccactacataataaaagagtagcgatattaaaagaatccgatgagaaaagactaatatttatctatccattcagtttgatttttcaggactttacatcgtcctgaaagtatttgttggtaccggtaccgaggacgcgtaaacatttacagttgcatgtggcctattgtttttagccgttaaatattttataactattaaatagcgatacaaattgttcgaaactaatattgtttatatcatatattctcgcatgttttaaagctttattaaattgattttttgtaaacagtttttcgtactctttgttaacccatttcattacaaaagtttcatatttttttctctctttaaatgccatttttgctggctttctttttaatacaattaatgtgctatccactttaggttttggatggaaataatacctaggaatttttgctaatatagaaatatctacctctgccattaacagcaatgctagtgatctgtttgtatctaataacattttagcaaaaccatattccactattaaataacttattgtggctgaactttcaaaaacaatttttcgaattatatttgtgcttatgttgtaaggtatgctgccaaatattttatatggattgtggctaggaaatgtaaatttcagtatatcatcatttactatttgatagttaggataatttaagagcttattacgagttacctcacataatttagaatcaatttctatcgccgttacaaaattacatctctttaccaatccagcagtaaaatgacctttccctgcacctatttcaaagatgttatctttttcatctaaacttatgcaattcattattttttctatgtgatattttgaagtaataaaattttgactatcttttatatttactttgttcattataacctctccttaatttattgcatctcttttcgaatatttatgttttttgagaaaagaacgtactcatggttcatcccgatatgcgtatcggtctgtatatcagcaactttctatgtgtttcaactacaatagtcatctattctcatctttctgagtccaccccctgcaaagcccctctttacgacataaaaattcggtcggaaaaggtatgcaaaagatgtttctctctttaagagaaactcttcgggatgcaaaaatatgaaaataactccaattcaccaaattatatagcgacttttttacaaaatgctaaaatttgttgatttccgtcaagcaattgttgagcaaaaatgtcttttacgataaaatgatacctcaatatcaactgtttagcaaaacgatatttctcttaaagagagaaacacctttttgttcaccaatccccgacttttaatcccgcggccatgattgaaaaaggaagagtatgagtattcaacatttccgtgtcgcccttattcccttttttgcggcattttgccttcctgtttttgctcacccagaaacgctggtgaaagtaaaagatgctgaagatcagttgggtgcacgagtgggttacatcgaactggatctcaacagcggtaagatccttgagagttttcgccccgaagaacgttttccaatgatgagcacttttaaagttctgctatgtggcgcggtattatcccgtattgacgccgggcaagagcaactcggtcgccgcatacactattctcagaatgacttggttgagtactcaccagtcacagaaaagcatcttacggatggcatgacagtaagagaattatgcagtgctgccataaccatgagtgataacactgcggccaacttacttctgacaacgatcggaggaccgaaggagctaaccgcttttttgcacaacatgggggatcatgtaactcgccttgatcgttgggaaccggagctgaatgaagccataccaaacgacgagcgtgacaccacgatgcctgtagcaatggcaacaacgttgcgcaaactattaactggcgaactacttactctagcttcccggcaacaattaatagactggatggaggcggataaagttgcaggaccacttctgcgctcggcccttccggctggctggtttattgctgataaatctggagccggtgagcgtgggtctcgcggtatcattgcagcactggggccagatggtaagccctcccgtatcgtagttatctacacgacggggagtcaggcaactatggatgaacgaaatagacagatcgctgagataggtgcctcactgattaagcattggtaactgtcagaccaagtttactcataacgcgtcaattcgagggggatcaattccgtgataggtgggctgcccttcctggttggcttggtttcatcagccatccgcttgccctcatctgttacgccggcggtagccggccagcctcgcagagcaggattcccgttgagcaccgccaggtgcgaataagggacagtgaagaaggaacacccgctcgcgggtgggcctacttcacctatcctgcccggctgacgccgttggatacaccaaggaaagtctacacgaaccctttggcaaaatcctgtatatcgtgcgaaaaaggatggatataccgaaaaaatcgctataatgaccccgaagcagggttatgcagcggaaaacggaattgatccggccacgatgcgtccggcgtagaggatctgaagatcagcagttcaacctgttgatagtacgtactaagctctcatgtttcacgtactaagctctcatgtttaacgtactaagctctcatgtttaacgaactaaaccctcatggctaacgtactaagctctcatggctaacgtactaagctctcatgtttcacgtactaagctctcatgtttgaacaataaaattaatataaatcagcaacttaaatagcctctaaggttttaagttttataagaaaaaaaagaatatataaggcttttaaagcttttaag

SEQ ID NO: 71 - DNA, 7579 bp, synthetic construct
  misc_feature 1..7579: note = Description of sequence: pBH503
  source 1..7579: mol_type = other DNA
gtttaacggttgtggacaacaagccagggatgtaacgcactgagaagcccttagagcctctcaaagcaattttgagtgacacaggaacacttaacggctgacatgggaattcccctccaccgcggtggccctgtacaaagaaaattcgacaaactgttatttttctatctatttatttgaattgtgagcggataacaattacctttgtcggcaattgtgagcggataacaattatgatctgtcctgatgagtccgtgaggacgaaacgagtaagctcgtcgacagaacgatgcgctgaatgttttagagctagaaatagcaagttaaaataaggctagtccgttatcaacttgaaaaagtggcaccgagtcggtgcttttttggccggcatggtcccagcctcctcgctggcgccggctgggcaacatgcttcggcatggcgaatgggacgcactctaatcgttatcggagtgcttttagattactaatcaaattgcttctactaattgcctatcttccagtgatggaacagcatttgaacgcattggctgcaacaatcagccttgatctggaagaagcaatgaaagctgctgttaagtctccgaatcaggtattgttcctgacaggtgtattcccatccggtaaacgcggatactttgcagttgatctgactcaggaataaattataaattaaggtaagaagattgtaggataagctaatgaaatagaaaaaggatgccgtcacacaacttgtcggcattcttttttgttttattagttgaaaatatagtgaaaaagttgcctaaatatgtatgttaacaaattatttgtcgtaactttgcactccaaatctgtttttaacatatggcactagtgaaaccagtaacgttatacgatgtcgcagagtatgccggtgtctcttatcagaccgtttcccgcgtggtgaaccaggccagccacgtttctgcgaaaacgcgggaaaaagtggaagcggcgatggcggagctgaattacattcccaaccgcgtggcacaacaactggcgggcaaacagtcgttgctgattggcgttgccacctccagtctggccctgcacgcgctgtcgcaaattgtcgcggcgattaaatctcgcgcctatcaactgggtgccagcgtgttcgtgtcgatggtagaacgaagcggcatcgaagcctgtaaaacggcggtgcacaatcttctcgcgcaacgcgtcagtgggctgatcattaactatccgctggataaccaggatgccattgctgtggaagctgcctgcactaatgttccggcgttatttcttgatgtctctgaccagacacccatcaacagtattattttctcccatgaagacggtacgcgactgggcgtggagcatctggtcgcattgggtcaccagcaaatcgcgctgttagcgggcccattaagttctgtctcggcgcgtctgcgtctggctggctggcataaatatctcactcgcaatcaaattcagccgatagcggaacgggaaggcgactggagtgccatgtccggttttcaacaaaccatgcaaatgctgaatgagggcatcgttcccactgcgatgctggttgccaacgatcagatggcgctgggcgcaatgcgcgccattaccgagaccgggctgcgcgttggtgcggatatctcggtagtgggatacgacgataccgaagacagctcatgttatatcccgccgttaaccaccatcaaacaggattttcgcctgctggggcaaaccagcgtggaccgcttgctgcaactctctcagggccaggcggtgaagggcaatcagctgttgcccgtctcactggtgaaaagaaaaaccaccctggcgcccaatacgcaaaccgcctctccccgcgcgttggccgattcattaatgcagctggcacgacaggtttcccgactggaaagcgggcagtgagctttcctcggtaccaaattccagaaaagaggcctcccgaaaggggggccttttttcgttttggtcctacttgtgcctgttctatttcctatgcggttcctggccttttgctggccttttgctcacatgttctttcctgcgttatcccctgattctgtggataaccgtattaccgcctttgagtgagctgatacatcccaaatgctgttccatcactggaagataggcaattagtagaagcaatttgattagtaatctaaaagcactccgataacgattagagtgcttttagattgtttatcattaattatcaaagcaagtgcagttcattatgccaggatgcgctcgcacagacgccaacccgtgacaccgttgatggtcacgcggaacagcaggctgccgtccgggttaatcagacgctcgtcaataatcttattgccattccacagggtaccggtgacggtgatctttttaccgtcaaaaacggcaatgccttcatacggacggccgaaatagtcaatcatattcggggtcacaccatcaatcaccagcgtaccgtaatgcaagataaccttgaagtggtgatcgtcaactgggtagacgactttaaagattttctcgatttgacccatttggtcaccgctcaggccttcgtacgggatgatcacatgaatatcaattttcagaccgttctcgccggacagaacgatgcgctgaatcggcgtcacgctcacacccaggttctggaacagagagcttacgccaccctgttccaggacttgatccaaattataacccgcggtctgacgccaatcgccaacaaaatcttccagagtaaaaaccatgtttatattatttatatttgtttgacgagaatatctttatttgccgacaaaggtacataactaaagtttcccacccaaataaatagatagaaaaataacagtttgtcgaattttctttgtacccgatacttgtgcctgttctatttccgaaccgaccgcttgtatgaatccatcaaaattcgttttctctatgttggattccttgttgctcatattgtgatgataatttctacaaatatagtcattggtaactatctatgaaactgtttgatacttttatagttgattaaacttgttcatggcatttgccttaatatcatccgctatgtcaatgtagggtttcatagctttgtagtcgctgtgtcccgtccatttcatgaccacctgtgccgggattccgagagccagcgcattgcagatgaatgtccttcttcctgcatgggtactgagcaaagcgtatttgggtgtgacttcatcaatacgttcatttcccttgtagtaggtttcccgtacaggctcgttgatttctgccagttcgcccagctctttcaggtaatcgttcatcttctggttgctgatgacgggcagagccatgtaattctcgaaatggatgtccttgtatttgtccagtatggctttgctgtatttgttcagttcaatcgtcaggctgtcggcagtcttgactgtggttatttcgatgtggtcggacttcacatcgcttcttttcagattgcgaacatccgaataccgcaaactcgtaaagcagcagaacaggaaaacatcacgcacacgttccaggtattgcttatccttgggtatctggtagtctttcagcttgttcagttcatcccaagtcaggaagattacttttttcgaggtggttttcagtttcggtttgaacgtatcgtatgcaatgttctgatgatgtcctttcctgaagctccagcgcaggaaccatttgaggaatcccatttgcttgccgatggtgctgtttctcatatccttggtgtcacgcaggaagttgacgtattcgttcaatccaaactcgttgaaatagttgaacgttgcatcctccttgaactctttgaggtggttcctcactgctgcaaatttttcataggtggatgccgtccagttattctggttaccgcactcttttacaaactcatcgaacacctcccaaaagctgacaggggcttcttccggctgttcttcactggtgtctttcattctcatgttgaaagcttccttcaactgttgggtcgttggcatgacctcctgcacctcaaattccttgaaaatattctggatttcggcatagtatttcagcaagtccgtattgatttcggctgcactttgctttagcttgttggtacatccgttctttacccgctgcttatctacatcccatttggctacgtcaatccggtagcccgttgtaaactcgatacgttggctggcaaagatgacacgcatacggatgggtacgttctctacgattggcacaccgttctttttccggctctccaatgcaaaaatgatgttgcgcttgatattcataattgggtgcgtttgaaattctacacccaaatatacacccaattattgagatagcaaaagacatttagaaacatttacttttactctatattgtaatttacacttgattatcagtcgtttgcagttttatgatattctgtgaaagtataagttcgagagcctgtctctccgcaaaaaacgctgaaaatcagcagattgcaaaacaaacaccctgttttacacccaagaatgtaaagtcggctgtttttgttttatttaagataatacaaccactacataataaaagagtagcgatattaaaagaatccgatgagaaaagactaatatttatctatccattcagtttgatttttcaggactttacatcgtcctgaaagtatttgttggtaccggtaccgaggacgcgtaaacatttacagttgcatgtggcctattgtttttagccgttaaatattttataactattaaatagcgatacaaattgttcgaaactaatattgtttatatcatatattctcgcatgttttaaagctttattaaattgattttttgtaaacagtttttcgtactctttgttaacccatttcattacaaaagtttcatatttttttctctctttaaatgccatttttgctggctttctttttaatacaattaatgtgctatccactttaggttttggatggaaataatacctaggaatttttgctaatatagaaatatctacctctgccattaacagcaatgctagtgatctgtttgtatctaataacattttagcaaaaccatattccactattaaataacttattgtggctgaactttcaaaaacaatttttcgaattatatttgtgcttatgttgtaaggtatgctgccaaatattttatatggattgtggctaggaaatgtaaatttcagtatatcatcatttactatttgatagttaggataatttaagagcttattacgagttacctcacataatttagaatcaatttctatcgccgttacaaaattacatctctttaccaatccagcagtaaaatgacctttccctgcacctatttcaaagatgttatctttttcatctaaacttatgcaattcattattttttctatgtgatattttgaagtaataaaattttgactatcttttatatttactttgttcattataacctctccttaatttattgcatctcttttcgaatatttatgttttttgagaaaagaacgtactcatggttcatcccgatatgcgtatcggtctgtatatcagcaactttctatgtgtttcaactacaatagtcatctattctcatctttctgagtccaccccctgcaaagcccctctttacgacataaaaattcggtcggaaaaggtatgcaaaagatgtttctctctttaagagaaactcttcgggatgcaaaaatatgaaaataactccaattcaccaaattatatagcgacttttttacaaaatgctaaaatttgttgatttccgtcaagcaattgttgagcaaaaatgtcttttacgataaaatgatacctcaatatcaactgtttagcaaaacgatatttctcttaaagagagaaacacctttttgttcaccaatccccgacttttaatcccgcggccatgattgaaaaaggaagagtatgagtattcaacatttccgtgtcgcccttattcccttttttgcggcattttgccttcctgtttttgctcacccagaaacgctggtgaaagtaaaagatgctgaagatcagttgggtgcacgagtgggttacatcgaactggatctcaacagcggtaagatccttgagagttttcgccccgaagaacgttttccaatgatgagcacttttaaagttctgctatgtggcgcggtattatcccgtattgacgccgggcaagagcaactcggtcgccgcatacactattctcagaatgacttggttgagtactcaccagtcacagaaaagcatcttacggatggcatgacagtaagagaattatgcagtgctgccataaccatgagtgataacactgcggccaacttacttctgacaacgatcggaggaccgaaggagctaaccgcttttttgcacaacatgggggatcatgtaactcgccttgatcgttgggaaccggagctgaatgaagccataccaaacgacgagcgtgacaccacgatgcctgtagcaatggcaacaacgttgcgcaaactattaactggcgaactacttactctagcttcccggcaacaattaatagactggatggaggcggataaagttgcaggaccacttctgcgctcggcccttccggctggctggtttattgctgataaatctggagccggtgagcgtgggtctcgcggtatcattgcagcactggggccagatggtaagccctcccgtatcgtagttatctacacgacggggagtcaggcaactatggatgaacgaaatagacagatcgctgagataggtgcctcactgattaagcattggtaactgtcagaccaagtttactcataacgcgtcaattcgagggggatcaattccgtgataggtgggctgcccttcctggttggcttggtttcatcagccatccgcttgccctcatctgttacgccggcggtagccggccagcctcgcagagcaggattcccgttgagcaccgccaggtgcgaataagggacagtgaagaaggaacacccgctcgcgggtgggcctacttcacctatcctgcccggctgacgccgttggatacaccaaggaaagtctacacgaaccctttggcaaaatcctgtatatcgtgcgaaaaaggatggatataccgaaaaaatcgctataatgaccccgaagcagggttatgcagcggaaaacggaattgatccggccacgatgcgtccggcgtagaggatctgaagatcagcagttcaacctgttgatagtacgtactaagctctcatgtttcacgtactaagctctcatgtttaacgtactaagctctcatgtttaacgaactaaaccctcatggctaacgtactaagctctcatggctaacgtactaagctctcatgtttcacgtactaagctctcatgtttgaacaataaaattaatataaatcagcaacttaaatagcctctaaggttttaagttttataagaaaaaaaagaatatataaggcttttaaagcttttaag

SEQ ID NO: 72 - DNA, 13020 bp, synthetic construct
  misc_feature 1..13020: note = Description of sequence: pBH504
  source 1..13020: mol_type = other DNA
gatgtaacgcactgagaagcccttagagcctctcaaagcaattttgagtgacacaggaacacttaacggctgacatgggaattcccctccaccgcggtgtattaatgcggctgcccctgtacaaagaaaattcgacaaactgttatttttctatctatttatttgaattgtgagcggataacaattacctttgtcggcaattgtgagcggataacaattatgatgttgtctgatgagtccgtgaggacgaaacgagtaagctcgtcacaacattggcaccgataacgttttagagctagaaatagcaagttaaaataaggctagtccgttatcaacttgaaaaagtggcaccgagtcggtgcttttttggccggcatggtcccagcctcctcgctggcgccggctgggcaacatgcttcggcatggcgaatgggacgcactctaatcgttatcggagtgcttttagattactaatcaaattgcttctactaattgcctatcttccagtgatggaacagcatttgaacgcattggctgcaacaatcagccttgatctggaagaagcaatgaaagctgctgttaagtctccgaatcaggtattgttcctgacaggtgtattcccatccggtaaacgcggatactttgcagttgatctgactcaggaataaattataaattaaggtaagaagattgtaggataagctaatgaaatagaaaaaggatgccgtcacacaacttgtcggcattcttttttgttttattagttgaaaatatagtgaaaaagttgcctaaatatgtatgttaacaaattatttgtcgtaactttgcactccaaatctgtttttaacatatggcactagtgaaaccagtaacgttatacgatgtcgcagagtatgccggtgtctcttatcagaccgtttcccgcgtggtgaaccaggccagccacgtttctgcgaaaacgcgggaaaaagtggaagcggcgatggcggagctgaattacattcccaaccgcgtggcacaacaactggcgggcaaacagtcgttgctgattggcgttgccacctccagtctggccctgcacgcgccgtcgcaaattgtcgcggcgattaaatctcgcgccgatcaactgggtgccagcgtggtggtgtcgatggtagaacgaagcggcgtcgaagcctgtaaaacggcggtgcacaatcttctcgcgcaacgcgtcagtgggctgatcattaactatccgctggatgaccaggatgccattgctgtggaagctgcctgcactaatgttccggcgttatttcttgatgtctctgaccagacacccatcaacagtattattttctcccatgaagacggtacgcgactgggcgtggagcatctggtcgcattgggtcaccagcaaatcgcgctgttagcgggcccattaagttctgtctcggcgcgtctgcgtctggctggctggcataaatatctcactcgcaatcaaattcagccgatagcggaacgggaaggcgactggagtgccatgtccggttttcaacaaaccatgcaaatgctgaatgagggcatcgttcccactgcgatgctggttgccaacgatcagatggcgctgggcgcaatgcgcgccattaccgagtccgggctgcgcgttggtgcggatatctcggtagtgggatacgacgataccgaagacagctcatgttatatcccgccgttaaccaccatcaaacaggattttcgcctgctggggcaaaccagcgtggaccgcttgctgcaactctctcagggccaggcggtgaagggcaatcagctgttgcccgtctcactggtgaaaagaaaaaccaccctggcgcccaatacgcaaaccgcctctccccgcgcgttggccgattcattaatgcagctggcacgacaggtttcccgactggaaagcgggcagtgagctttcctcggtaccaaattccagaaaagaggcctcccgaaaggggggccttttttcgttttggtcctacttgtgcctgttctatttcctatgcggttcctggccttttgctggccttttgctcacatgttctttcctgcgttatcccctgattctgtggataaccgtattaccgcctttgagtgagctgatacatcccaaatgctgctcggtaccaaagacgaacaataagacgctgaaaagcgtcttttttcgttttggtccgataaagtttggaagataaagctaaaagttcttatctttgcagtccgaaataaagacatataaaagaaaagacaccatggataagaaatactcaataggcttagctatcggcacaaatagcgtcggatgggcggtgatcactgatgaatataaggttccgtctaaaaagttcaaggttctgggaaatacagaccgccacagtatcaaaaaaaatcttataggggctcttttatttgacagtggagagacagcggaagcgactcgtctcaaacggacagctcgtagaaggtatacacgtcggaagaatcgtatttgttatctacaggagattttttcaaatgagatggcgaaagtagatgatagtttctttcatcgacttgaagagtcttttttggtggaagaagacaagaagcatgaacgtcatcctatttttggaaatatagtagatgaagttgcttatcatgagaaatatccaactatctatcatctgcgaaaaaaattggtagattctactgataaagcggatttgcgcttaatctatttggccttagcgcatatgattaagtttcgtggtcattttttgattgagggagatttaaatcctgataatagtgatgtggacaaactatttatccagttggtacaaacctacaatcaattatttgaagaaaaccctattaacgcaagtggagtagatgctaaagcgattctttctgcacgattgagtaaatcaagacgattagaaaatctcattgctcagctccccggtgagaagaaaaatggcttatttgggaatctcattgctttgtcattgggtttgacccctaattttaaatcaaattttgatttggcagaagatgctaaattacagctttcaaaagatacttacgatgatgatttagataatttattggcgcaaattggagatcaatatgctgatttgtttttggcagctaagaatttatcagatgctattttactttcagatatcctaagagtaaatactgaaataactaaggctcccctatcagcttcaatgattaaacgctacgatgaacatcatcaagacttgactcttttaaaagctttagttcgacaacaacttccagaaaagtataaagaaatcttttttgatcaatcaaaaaacggatatgcaggttatattgatgggggagctagccaagaagaattttataaatttatcaaaccaattttagaaaaaatggatggtactgaggaattattggtgaaactaaatcgtgaagatttgctgcgcaagcaacggacctttgacaacggctctattccccatcaaattcacttgggtgagctgcatgctattttgagaagacaagaagacttttatccatttttaaaagacaatcgtgagaagattgaaaaaatcttgacttttcgaattccttattatgttggtccattggcgcgtggcaatagtcgttttgcatggatgactcggaagtctgaagaaacaattaccccatggaattttgaagaagttgtcgataaaggtgcttcagctcaatcatttattgaacgcatgacaaactttgataaaaatcttccaaatgaaaaagtactaccaaaacatagtttgctttatgagtattttacggtttataacgaattgacaaaggtcaaatatgttactgaaggaatgcgaaaaccagcatttctttcaggtgaacagaagaaagccattgttgatttactcttcaaaacaaatcgaaaagtaaccgttaagcaattaaaagaagattatttcaaaaaaatagaatgttttgatagtgttgaaatttcaggagttgaagatagatttaatgcttcattaggtacctaccatgatttgctaaaaattattaaagataaagattttttggataatgaagaaaatgaagatatcttagaggatattgttttaacattgaccttatttgaagatagggagatgattgaggaaagacttaaaacatatgctcacctctttgatgataaggtgatgaaacagcttaaacgtcgccgttatactggttggggacgtttgtctcgaaaattgattaatggtattagggataagcaatctggcaaaacaatattagattttttgaaatcagatggttttgccaatcgcaattttatgcagctgatccatgatgatagtttgacatttaaagaagacattcaaaaagcacaagtgtctggacaaggcgatagtttacatgaacatattgcaaatttagctggtagccctgctattaaaaaaggtattttacagactgtaaaagttgttgatgaattggtcaaagtaatggggcggcataagccagaaaatatcgttattgaaatggcacgtgaaaatcagacaactcaaaagggccagaaaaattcgcgagagcgtatgaaacgaatcgaagaaggtatcaaagaattaggaagtcagattcttaaagagcatcctgttgaaaatactcaattgcaaaatgaaaagctctatctctattatctccaaaatggaagagacatgtatgtggaccaagaattagatattaatcgtttaagtgattatgatgtcgatgccattgttccacaaagtttccttaaagacgattcaatagacaataaggtcttaacgcgttctgataaaaatcgtggtaaatcggataacgttccaagtgaagaagtagtcaaaaagatgaaaaactattggagacaacttctaaacgccaagttaatcactcaacgtaagtttgataatttaacgaaagctgaacgtggtggtttgagtgaacttgataaagctggttttatcaaacgccaattggttgaaactcgccaaatcactaagcatgtggcacaaattttggatagtcgcatgaatactaaatacgatgaaaatgataaacttattcgagaggttaaagtgattaccttaaaatctaaattagtttctgacttccgaaaagatttccaattctataaagtacgtgagattaacaattaccatcatgcccatgatgcgtatctaaatgccgtcgttggaactgctttgattaagaaatatccaaaacttgaatcggagtttgtctatggtgattataaagtttatgatgttcgtaaaatgattgctaagtctgagcaagaaataggcaaagcaaccgcaaaatatttcttttactctaatatcatgaacttcttcaaaacagaaattacacttgcaaatggagagattcgcaaacgccctctaatcgaaactaatggggaaactggagaaattgtctgggataaagggcgagattttgccacagtgcgcaaagtattgtccatgccccaagtcaatattgtcaagaaaacagaagtacagacaggcgaattctccaaggagtcaattttaccaaaaagaaattcggacaagcttattgctcgtaaaaaagactgggatccaaaaaaatatggtggttttgatagtccaacggtagcttattcagtcctagtggttgctaaggtggaaaaagggaaatcgaagaagttaaaatccgttaaagagttactagggatcacaattatggaaagaagttcctttgaaaaaaatccgattgactttttagaagctaaaggatataaggaagttaaaaaagacttaatcattaaactacctaaatatagtctttttgagttagaaaacggtcgtaaacggatgctggctagtgccggagaattacaaaaaggaaatgagctggctctgccaagcaaatatgtgaattttttatatttagctagtcattatgaaaagttgaagggtagtccagaagataacgaacaaaaacaattgtttgtggagcagcataagcattatttagatgagattattgagcaaatcagtgaattttctaagcgtgttattttagcagatgccaatttagataaagttcttagtgcatataacaaacatagagacaaaccaatacgtgaacaagcagaaaatattattcatttatttacgttgacgaatcttggagctcccgctgcttttaaatattttgatacaacaattgatcgtaaacgatatacgtctacaaaagaagttttagatgccactcttatccatcaatccatcactggtctttatgaaacacgcattgatttgagtcagctaggaggtgactgattctttgtacccgataattgcctatcttccagtgatggaacagcatttgtgcattggctgcaacaatcagccttacttgtgcctgttctatttccgaaccgaccgcttgtatgaatgcatcaaaattcgttttctctacgttggattccttgttgctcatattgtgatgataatttctacaaatatagtcattggtaactatctatgaaactgtttgatacttttatcagtctaatagttttacaaggtctttcttcatttcttcgtcaatatccctgtatcgtctgaaagctttgcttccctccttgtgtcccgacagtgcggaaacaaggttcgggtctttcacttttttatagatattgccgataaacgtacgtcttgccagatggctgcttgccacttcataaataggtcgtttgatttcgttgtgcgtcaacgggtctaagattgttacgatgcggtcaactccagctaatttgaatatcttttttatggcatcattgtacttttgctcggatatgaacggcaacagttttccctcatattctttgtagcgttcaaggatttctttcgctttgtcgttaagtggaacacgtaccgtaaccggattcccctctttggttttcttgggaatatattctatggcttcattgaccacatttagtttggtcattcggtacaggtcgctcaccctgcatcctatcagtgtctgaaatatgaatatatccctctgtattgccagttgtggggtggcagaaaggtctgcattaaaaatcctgtccctttcttcgagtgttatataataaggtgtaccatatgtacactcctctatcggaaacttgtcgaaaggtctgtttgtggtgcgtttgttatcgaagcaccacaggaagaatgtgcgtattcttgaaaaacagtctatcagcgtgtttttgcttctgggctgtggtgtcctcttttcgggaatggcttcataaatgctcgggtaaagttcataatactggtattcgttctgaaagaaatcccacatatcccgaagcgtgtcaggtgttaccaaatccacatcaaggataaagcccttttgtcctctctttgtagcccttacatatagttcataacgcagtaaggctcttttgacaacccggaaatttttctttcgtacttccgacaaagggtgcttgtttagaaattcatcgaatagttctccaatggtaggcttgataaccacttcctccggcaaaaaatatttttcaggatggtaaaatttatcaagtgttgtttttagccattctttgtctattgcttccttttcttgttgatataccttctcgatataggttttcaactggcgtatctcttcatttatatgggtacgcatttcttcattgcagacagctttcgtttttacacattcgtctttatcatcccatagattgggattgatggctaactgagtaggagcaacggagtctaactgccttccgtttctaaaacggacatagattgtagccatggattctgtatcatatcgtttggctgcttttttaatgataaaggttactttcatagactttcaggttgaattttactctgctgcaaatataaatattttccccagcattttccccacatctgctaaatattttgcaattcgattaaacttggattaaaatttaataggattataacatattgaaatacagtgtaattgtggcgtttttccgcatttttctttttacccacattttccccactttaattatttcaaatgcggggtctgggtacaagaaagaaagctaagtatttgatagttcaatacttagctttttcttttgcttgaattttccccacattttccccacacgtgcaaaaaatatagcagtaagtcattatttcttttggttgaacgtagagagtagcgatattaaaagaatccgatgagaaaagactaatatttatctatccattcagtttgatttttcaggactttacatcgtcctgaaagtatttgttggtaccggtaccgaggacgcgtaaacatttacagttgcatgtggcctattgtttaggacgcgttatctccttaacgtacgttttcgttccattggccctcaaaccccgttatatacattcatgtccatttatgtaaaaaatcctgctgaccttgtttatgtcttgtcagtcaccatttgcaaaaccatatttgaccctcaaagaggctgaatttgataagcaacttgctacatactcataataaggagctaaatagaacacgaatgggaaatactcaaatgccaaactaaagaagatattggccaaaataaacgctataccgagagagaaacttgatttttcaacttcctaaccaacagtgttgttcaaacatttctacttatttgtacttaccagttgaacctacgtttccctaataaaatgtctatggtaaaaagttaaaaaatcctcctacttttgttagatatatttttttgtgtaattttgtaatcgttatgcggcagtaataatatacatattaatacgagttaggaatcctgtagttctcatatgctacgaggaggtattaaaaggtgcgtttcgacaatgcatctattgtagtatattattgcttaatccaaatgaatattataaatttaggaattcttgctcacattgatgcaggaaaaacttccgtaaccgagaatctgctgtttgccagtggagcaacggaaaagtgcggctgtgtggataatggtgacaccataacggactctatggatatagagaaacgtagaggaattactgttcgggcttctacgacatctattatctggaatggtgtgaaatgcaatatcattgacactccgggacacatggattttattgcggaagtggagcggacattcaaaatgcttgatggagcagtcctcatcttatccgcaaaggaaggcatacaagcgcagacaaagttgctgttcaatactttacagaagctgcaaatcccgacaattatatttatcaataagattgaccgagccggtgtgaatttggagcgtttgtatctggatataaaagcaaatctgtctcaagatgtcctgtttatgcaaaatgttgtcgatggatcggtttatccggtttgctcccaaacatatataaaggaagaatacaaagaatttgtatgcaaccatgacgacaatatattagaacgatatttggcggatagcgaaatttcaccggctgattattggaatacgataatcgctcttgtggcaaaagccaaagtctatccggtgctacatggatcagcaatgttcaatatcggtatcaatgagttgttggacgccatcacttcttttatacttcctccggcatcggtctcaaacagactttcatcttatctttataagatagagcatgaccccaaaggacataaaagaagttttctaaaaataattgacggaagtctgagacttcgagacgttgtaagaatcaacgattcggaaaaattcatcaagattaaaaatctaaaaactatcaatcagggcagagagataaatgttgatgaagtgggcgccaatgatatcgcgattgtagaggatatggatgattttcgaatcggaaattatttaggtgctgaaccttgtttgattcaaggattatcgcatcagcatcccgctctcaaatcctccgtccggccagacaggcccgaagagagaagcaaggtgatatccgctctgaatacattgtggattgaagacccgtctttgtccttttccataaactcatatagtgatgaattggaaatctcgttatatggtttaacccaaaaggaaatcatacagacattgctggaagaacgattttccgtaaaggtccattttgatgagatcaagactatatacaaagaacgacctgtaaaaaaggtcaataagattattcagatcgaagtgccgcccaacccttattgggccacaatagggctgactcttgaacccttaccgttagggacagggttgcaaatcgaaagtgacatctcctatggttatctgaaccattcttttcaaaatgccgtttttgaagggattcgtatgtcttgccaatccgggttacatggatgggaagtgactgatctgaaagtaacttttactcaagccgagtattatagcccggtaagtacacctgctgatttcagacagctgaccccttatgtcttcaggctggccttgcaacagtcaggtgtggacattctcgaaccgatgctctattttgagttgcagataccccaagcggcaagttccaaagctattacagatttgcaaaaaatgatgtctgagattgaagacatcagttgcaataatgagtggtgtcatattaaagggaaagttccattaaatacaagtaaagactatgcatcagaagtaagttcatacactaagggcttaggcatttttatggttaagccatgcgggtatcaaataacaaaaggcggttattctgataatatccgcatgaacgaaaaagataaacttttattcatgttccaaaaatcaatgtcatcaaaataatggtataacctctccttaatttattgcatctcttttcgaatatttatgttttttgagaaaagaacgtactcatggttcatcccgatatgcgtatcggtctgtatatcagcaactttctatgtgtttcaactacaatagtcatctattctcatctttctgagtccaccccctgcaaagcccctctttacgacataaaaattcggtcggaaaaggtatgcaaaagatgtttctctctttaagagaaactcttcgggatgcaaaaatatgaaaataactccaattcaccaaattatatagcgacttttttacaaaatgctaaaatttgttgatttccgtcaagcaattgttgagcaaaaatgtcttttacgataaaatgatacctcaatatcaactgtttagcaaaacgatatttctcttaaagagagaaacacctttttgttcaccaatccccgacttttaatcccgcggccatgattgaaaaaggaagagtatgagtattcaacatttccgtgtcgcccttattcccttttttgcggcattttgccttcctgtttttgctcacccagaaacgctggtgaaagtaaaagatgctgaagatcagttgggtgcacgagtgggttacatcgaactggatctcaacagcggtaagatccttgagagttttcgccccgaagaacgttttccaatgatgagcacttttaaagttctgctatgtggcgcggtattatcccgtattgacgccgggcaagagcaactcggtcgccgcatacactattctcagaatgacttggttgagtactcaccagtcacagaaaagcatcttacggatggcatgacagtaagagaattatgcagtgctgccataaccatgagtgataacactgcggccaacttacttctgacaacgatcggaggaccgaaggagctaaccgcttttttgcacaacatgggggatcatgtaactcgccttgatcgttgggaaccggagctgaatgaagccataccaaacgacgagcgtgacaccacgatgcctgtagcaatggcaacaacgttgcgcaaactattaactggcgaactacttactctagcttcccggcaacaattaatagactggatggaggcggataaagttgcaggaccacttctgcgctcggcccttccggctggctggtttattgctgataaatctggagccggtgagcgtgggtcacgcggtatcattgcagcactggggccagatggtaagccctcccgtatcgtagttatctacacgacggggagtcaggcaactatggatgaacgaaatagacagatcgctgagataggtgcctcactgattaagcattggtaactgtcagaccaagtttactcataacgcgtcaattcgagggggatcaattccgtgataggtgggctgcccttcctggttggcttggtttcatcagccatccgcttgccctcatctgttacgccggcggtagccggccagcctcgcagagcaggattcccgttgagcaccgccaggtgcgaataagggacagtgaagaaggaacacccgctcgcgggtgggcctacttcacctatcctgcccggctgacgccgttggatacaccaaggaaagtctacacgaaccctttggcaaaatcctgtatatcgtgcgaaaaaggatggatataccgaaaaaatcgctataatgaccccgaagcagggttatgcagcggaaaacggaattgatccggccacgatgcgtccggcgtagaggatctgaagatcagcagttcaacctgttgatagtacgtactaagctctcatgtttcacgtactaagctctcatgtttaacgtactaagctctcatgtttaacgaactaaaccctcatggctaacgtactaagctctcatggctaacgtactaagctctcatgtttcacgtactaagctctcatgtttgaacaataaaattaatataaatcagcaacttaaatagcctctaaggttttaagttttataagaaaaaaaagaatatataaggcttttaaagcttttaaggtttaacggttgtggacaacaagccagg

SEQ ID NO: 73 - DNA, 13053 bp, synthetic construct
  misc_feature 1..13053: note = Description of sequence: pBH505
  source 1..13053: mol_type = other DNA
gatgtaacgcactgagaagcccttagagcctctcaaagcaattttgagtgacacaggaacacttaacggctgacatgggaattcccctccaccgcggtgtattaatgcggctgcccctgtacaaagaaaattcgacaaactgttatttttctatctatttatttgaattgtgagcggataacaattacctttgtcggcaattgtgagcggataacaattatgatgttgtctgatgagtccgtgaggacgaaacgagtaagctcgtcacaacattggcaccgataacgttttagagctagaaatagcaagttaaaataaggctagtccgttatcaacttgaaaaagtggcaccgagtcggtgcttttttggccggcatggtcccagcctcctcgctggcgccggctgggcaacatgcttcggcatggcgaatgggacgcactctaatcgttatcggagtgcttttagattactaatcaaattgcttctactaattgcctatcttccagtgatggaacagcatttgaacgcattggctgcaacaatcagccttgatctggaagaagcaatgaaagctgctgttaagtctccgaatcaggtattgttcctgacaggtgtattcccatccggtaaacgcggatactttgcagttgatctgactcaggaataaattataaattaaggtaagaagattgtaggataagctaatgaaatagaaaaaggatgccgtcacacaacttgtcggcattcttttttgttttattagttgaaaatatagtgaaaaagttgcctaaatatgtatgttaacaaattatttgtcgtaactttgcactccaaatctgtttttaacatatggcactagtgaaaccagtaacgttatacgatgtcgcagagtatgccggtgtctcttatcagaccgtttcccgcgtggtgaaccaggccagccacgtttctgcgaaaacgcgggaaaaagtggaagcggcgatggcggagctcaattacattcccaaccgcgtggcacaacaactggcgggcaaagcgtcgcataccattggcatgttgatcactgccagtaccaatcctttctattcagaactggtgcgtggcgttgaacgcagctgcttcgaacgcggttatagtctcgtcctttgcaataccgaaggcgatgaacagcggatgaatcgcaatctggaaacgctgatgcaaaaacgcgttgatggcttgctgttactgtgcaccgaaacgcatcaaccttcgcgtgaaatcatgcaacgttatccgacagtgcctactgtgatgatggactgggctccgttcgatggcgacagcgatcttattcaggataactcgttgctgggcggagacttagcaacgcaatatctgatcgataaaggtcatacccgtatcgcctgtattaccggcccgctggataaaactccggcgcgcctgcggttggaaggttatcgggcggcgatgaaacgtgcgggtctcaacattcctgatggctatgaagtcactggtgattttgaatttaacggcgggtttgacgctatgcgccaactgctatcacatccgctgcgtcctcaggccgtctttaccggaaatgacgctatggctgttggcgtttaccaggcgttatatcaggcagagttacaggttccgcaggatatcgcggtgattggctatgacgatatcgaactggcaagctttatgacgccaccattaaccactatccaccaaccgaaagatgaactgggggagctggcgattgatgtactcatccatcggataacccagccgacccttcagcaacaacgattacaacttactccgattctgatggaacgcggttcggcttagctggtgaaaagaaaaaccaccctggcgcccaatacgcaaaccgcctctccccgcgcgttggccgattcattaatgcagctggcacgacaggtttcccgactggaaagcgggcagtgagctttcctcggtaccaaattccagaaaagaggcctcccgaaaggggggccttttttcgttttggtcctacttgtgcctgttctatttcctatgcggttcctggccttttgctggccttttgctcacatgttctttcctgcgttatcccctgattctgtggataaccgtattaccgcctttgagtgagctgatacatcccaaatgctgctcggtaccaaagacgaacaataagacgctgaaaagcgtcttttttcgttttggtccgataaagtttggaagataaagctaaaagttcttatctttgcagtccgaaataaagacatataaaagaaaagacaccatggataagaaatactcaataggcttagctatcggcacaaatagcgtcggatgggcggtgatcactgatgaatataaggttccgtctaaaaagttcaaggttctgggaaatacagaccgccacagtatcaaaaaaaatcttataggggctcttttatttgacagtggagagacagcggaagcgactcgtctcaaacggacagctcgtagaaggtatacacgtcggaagaatcgtatttgttatctacaggagattttttcaaatgagatggcgaaagtagatgatagtttctttcatcgacttgaagagtcttttttggtggaagaagacaagaagcatgaacgtcatcctatttttggaaatatagtagatgaagttgcttatcatgagaaatatccaactatctatcatctgcgaaaaaaattggtagattctactgataaagcggatttgcgcttaatctatttggccttagcgcatatgattaagtttcgtggtcattttttgattgagggagatttaaatcctgataatagtgatgtggacaaactatttatccagttggtacaaacctacaatcaattatttgaagaaaaccctattaacgcaagtggagtagatgctaaagcgattctttctgcacgattgagtaaatcaagacgattagaaaatctcattgctcagctccccggtgagaagaaaaatggcttatttgggaatctcattgctttgtcattgggtttgacccctaattttaaatcaaattttgatttggcagaagatgctaaattacagctttcaaaagatacttacgatgatgatttagataatttattggcgcaaattggagatcaatatgctgatttgtttttggcagctaagaatttatcagatgctattttactttcagatatcctaagagtaaatactgaaataactaaggctcccctatcagcttcaatgattaaacgctacgatgaacatcatcaagacttgactcttttaaaagctttagttcgacaacaacttccagaaaagtataaagaaatcttttttgatcaatcaaaaaacggatatgcaggttatattgatgggggagctagccaagaagaattttataaatttatcaaaccaattttagaaaaaatggatggtactgaggaattattggtgaaactaaatcgtgaagatttgctgcgcaagcaacggacctttgacaacggctctattccccatcaaattcacttgggtgagctgcatgctattttgagaagacaagaagacttttatccatttttaaaagacaatcgtgagaagattgaaaaaatcttgacttttcgaattccttattatgttggtccattggcgcgtggcaatagtcgttttgcatggatgactcggaagtctgaagaaacaattaccccatggaattttgaagaagttgtcgataaaggtgcttcagctcaatcatttattgaacgcatgacaaactttgataaaaatcttccaaatgaaaaagtactaccaaaacatagtttgctttatgagtattttacggtttataacgaattgacaaaggtcaaatatgttactgaaggaatgcgaaaaccagcatttctttcaggtgaacagaagaaagccattgttgatttactcttcaaaacaaatcgaaaagtaaccgttaagcaattaaaagaagattatttcaaaaaaatagaatgttttgatagtgttgaaatttcaggagttgaagatagatttaatgcttcattaggtacctaccatgatttgctaaaaattattaaagataaagattttttggataatgaagaaaatgaagatatcttagaggatattgttttaacattgaccttatttgaagatagggagatgattgaggaaagacttaaaacatatgctcacctctttgatgataaggtgatgaaacagcttaaacgtcgccgttatactggttggggacgtttgtctcgaaaattgattaatggtattagggataagcaatctggcaaaacaatattagattttttgaaatcagatggttttgccaatcgcaattttatgcagctgatccatgatgatagtttgacatttaaagaagacattcaaaaagcacaagtgtctggacaaggcgatagtttacatgaacatattgcaaatttagctggtagccctgctattaaaaaaggtattttacagactgtaaaagttgttgatgaattggtcaaagtaatggggcggcataagccagaaaatatcgttattgaaatggcacgtgaaaatcagacaactcaaaagggccagaaaaattcgcgagagcgtatgaaacgaatcgaagaaggtatcaaagaattaggaagtcagattcttaaagagcatcctgttgaaaatactcaattgcaaaatgaaaagctctatctctattatctccaaaatggaagagacatgtatgtggaccaagaattagatattaatcgtttaagtgattatgatgtcgatgccattgttccacaaagtttccttaaagacgattcaatagacaataaggtcttaacgcgttctgataaaaatcgtggtaaatcggataacgttccaagtgaagaagtagtcaaaaagatgaaaaactattggagacaacttctaaacgccaagttaatcactcaacgtaagtttgataatttaacgaaagctgaacgtggtggtttgagtgaacttgataaagctggttttatcaaacgccaattggttgaaactcgccaaatcactaagcatgtggcacaaattttggatagtcgcatgaatactaaatacgatgaaaatgataaacttattcgagaggttaaagtgattaccttaaaatctaaattagtttctgacttccgaaaagatttccaattctataaagtacgtgagattaacaattaccatcatgcccatgatgcgtatctaaatgccgtcgttggaactgctttgattaagaaatatccaaaacttgaatcggagtttgtctatggtgattataaagtttatgatgttcgtaaaatgattgctaagtctgagcaagaaataggcaaagcaaccgcaaaatatttcttttactctaatatcatgaacttcttcaaaacagaaattacacttgcaaatggagagattcgcaaacgccctctaatcgaaactaatggggaaactggagaaattgtctgggataaagggcgagattttgccacagtgcgcaaagtattgtccatgccccaagtcaatattgtcaagaaaacagaagtacagacaggcgaattctccaaggagtcaattttaccaaaaagaaattcggacaagcttattgctcgtaaaaaagactgggatccaaaaaaatatggtggttttgatagtccaacggtagcttattcagtcctagtggttgctaaggtggaaaaagggaaatcgaagaagttaaaatccgttaaagagttactagggatcacaattatggaaagaagttcctttgaaaaaaatccgattgactttttagaagctaaaggatataaggaagttaaaaaagacttaatcattaaactacctaaatatagtctttttgagttagaaaacggtcgtaaacggatgctggctagtgccggagaattacaaaaaggaaatgagctggctctgccaagcaaatatgtgaattttttatatttagctagtcattatgaaaagttgaagggtagtccagaagataacgaacaaaaacaattgtttgtggagcagcataagcattatttagatgagattattgagcaaatcagtgaattttctaagcgtgttattttagcagatgccaatttagataaagttcttagtgcatataacaaacatagagacaaaccaatacgtgaacaagcagaaaatattattcatttatttacgttgacgaatcttggagctcccgctgcttttaaatattttgatacaacaattgatcgtaaacgatatacgtctacaaaagaagttttagatgccactcttatccatcaatccatcactggtctttatgaaacacgcattgatttgagtcagctaggaggtgactgattctttgtacccgataattgcctatcttccagtgatggaacagcatttgtgcattggctgcaacaatcagccttacttgtgcctgttctatttccgaaccgaccgcttgtatgaatgcatcaaaattcgttttctctacgttggattccttgttgctcatattgtgatgataatttctacaaatatagtcattggtaactatctatgaaactgtttgatacttttatcagtctaatagttttacaaggtctttcttcatttcttcgtcaatatccctgtatcgtctgaaagctttgcttccctccttgtgtcccgacagtgcggaaacaaggttcgggtctttcacttttttatagatattgccgataaacgtacgtcttgccagatggctgcttgccacttcataaataggtcgtttgatttcgttgtgcgtcaacgggtctaagattgttacgatgcggtcaactccagctaatttgaatatcttttttatggcatcattgtacttttgctcggatatgaacggcaacagttttccctcatattctttgtagcgttcaaggatttctttcgctttgtcgttaagtggaacacgtaccgtaaccggattcccctctttggttttcttgggaatatattctatggcttcattgaccacatttagtttggtcattcggtacaggtcgctcaccctgcatcctatcagtgtctgaaatatgaatatatccctctgtattgccagttgtggggtggcagaaaggtctgcattaaaaatcctgtccctttcttcgagtgttatataataaggtgtaccatatgtacactcctctatcggaaacttgtcgaaaggtctgtttgtggtgcgtttgttatcgaagcaccacaggaagaatgtgcgtattcttgaaaaacagtctatcagcgtgtttttgcttctgggctgtggtgtcctcttttcgggaatggcttcataaatgctcgggtaaagttcataatactggtattcgttctgaaagaaatcccacatatcccgaagcgtgtcaggtgttaccaaatccacatcaaggataaagcccttttgtcctctctttgtagcccttacatatagttcataacgcagtaaggctcttttgacaacccggaaatttttctttcgtacttccgacaaagggtgcttgtttagaaattcatcgaatagttctccaatggtaggcttgataaccacttcctccggcaaaaaatatttttcaggatggtaaaatttatcaagtgttgtttttagccattctttgtctattgcttccttttcttgttgatataccttctcgatataggttttcaactggcgtatctcttcatttatatgggtacgcatttcttcattgcagacagctttcgtttttacacattcgtctttatcatcccatagattgggattgatggctaactgagtaggagcaacggagtctaactgccttccgtttctaaaacggacatagattgtagccatggattctgtatcatatcgtttggctgcttttttaatgataaaggttactttcatagactttcaggttgaattttactctgctgcaaatataaatattttccccagcattttccccacatctgctaaatattttgcaattcgattaaacttggattaaaatttaataggattataacatattgaaatacagtgtaattgtggcgtttttccgcatttttctttttacccacattttccccactttaattatttcaaatgcggggtctgggtacaagaaagaaagctaagtatttgatagttcaatacttagctttttcttttgcttgaattttccccacattttccccacacgtgcaaaaaatatagcagtaagtcattatttcttttggttgaacgtagagagtagcgatattaaaagaatccgatgagaaaagactaatatttatctatccattcagtttgatttttcaggactttacatcgtcctgaaagtatttgttggtaccggtaccgaggacgcgtaaacatttacagttgcatgtggcctattgtttaggacgcgttatctccttaacgtacgttttcgttccattggccctcaaaccccgttatatacattcatgtccatttatgtaaaaaatcctgctgaccttgtttatgtcttgtcagtcaccatttgcaaaaccatatttgaccctcaaagaggctgaatttgataagcaacttgctacatactcataataaggagctaaatagaacacgaatgggaaatactcaaatgccaaactaaagaagatattggccaaaataaacgctataccgagagagaaacttgatttttcaacttcctaaccaacagtgttgttcaaacatttctacttatttgtacttaccagttgaacctacgtttccctaataaaatgtctatggtaaaaagttaaaaaatcctcctacttttgttagatatatttttttgtgtaattttgtaatcgttatgcggcagtaataatatacatattaatacgagttaggaatcctgtagttctcatatgctacgaggaggtattaaaaggtgcgtttcgacaatgcatctattgtagtatattattgcttaatccaaatgaatattataaatttaggaattcttgctcacattgatgcaggaaaaacttccgtaaccgagaatctgctgtttgccagtggagcaacggaaaagtgcggctgtgtggataatggtgacaccataacggactctatggatatagagaaacgtagaggaattactgttcgggcttctacgacatctattatctggaatggtgtgaaatgcaatatcattgacactccgggacacatggattttattgcggaagtggagcggacattcaaaatgcttgatggagcagtcctcatcttatccgcaaaggaaggcatacaagcgcagacaaagttgctgttcaatactttacagaagctgcaaatcccgacaattatatttatcaataagattgaccgagccggtgtgaatttggagcgtttgtatctggatataaaagcaaatctgtctcaagatgtcctgtttatgcaaaatgttgtcgatggatcggtttatccggtttgctcccaaacatatataaaggaagaatacaaagaatttgtatgcaaccatgacgacaatatattagaacgatatttggcggatagcgaaatttcaccggctgattattggaatacgataatcgctcttgtggcaaaagccaaagtctatccggtgctacatggatcagcaatgttcaatatcggtatcaatgagttgttggacgccatcacttcttttatacttcctccggcatcggtctcaaacagactttcatcttatctttataagatagagcatgaccccaaaggacataaaagaagttttctaaaaataattgacggaagtctgagacttcgagacgttgtaagaatcaacgattcggaaaaattcatcaagattaaaaatctaaaaactatcaatcagggcagagagataaatgttgatgaagtgggcgccaatgatatcgcgattgtagaggatatggatgattttcgaatcggaaattatttaggtgctgaaccttgtttgattcaaggattatcgcatcagcatcccgctctcaaatcctccgtccggccagacaggcccgaagagagaagcaaggtgatatccgctctgaatacattgtggattgaagacccgtctttgtccttttccataaactcatatagtgatgaattggaaatctcgttatatggtttaacccaaaaggaaatcatacagacattgctggaagaacgattttccgtaaaggtccattttgatgagatcaagactatatacaaagaacgacctgtaaaaaaggtcaataagattattcagatcgaagtgccgcccaacccttattgggccacaatagggctgactcttgaacccttaccgttagggacagggttgcaaatcgaaagtgacatctcctatggttatctgaaccattcttttcaaaatgccgtttttgaagggattcgtatgtcttgccaatccgggttacatggatgggaagtgactgatctgaaagtaacttttactcaagccgagtattatagcccggtaagtacacctgctgatttcagacagctgaccccttatgtcttcaggctggccttgcaacagtcaggtgtggacattctcgaaccgatgctctattttgagttgcagataccccaagcggcaagttccaaagctattacagatttgcaaaaaatgatgtctgagattgaagacatcagttgcaataatgagtggtgtcatattaaagggaaagttccattaaatacaagtaaagactatgcatcagaagtaagttcatacactaagggcttaggcatttttatggttaagccatgcgggtatcaaataacaaaaggcggttattctgataatatccgcatgaacgaaaaagataaacttttattcatgttccaaaaatcaatgtcatcaaaataatggtataacctctccttaatttattgcatctcttttcgaatatttatgttttttgagaaaagaacgtactcatggttcatcccgatatgcgtatcggtctgtatatcagcaactttctatgtgtttcaactacaatagtcatctattctcatctttctgagtccaccccctgcaaagcccctctttacgacataaaaattcggtcggaaaaggtatgcaaaagatgtttctctctttaagagaaactcttcgggatgcaaaaatatgaaaataactccaattcaccaaattatatagcgacttttttacaaaatgctaaaatttgttgatttccgtcaagcaattgttgagcaaaaatgtcttttacgataaaatgatacctcaatatcaactgtttagcaaaacgatatttctcttaaagagagaaacacctttttgttcaccaatccccgacttttaatcccgcggccatgattgaaaaaggaagagtatgagtattcaacatttccgtgtcgcccttattcccttttttgcggcattttgccttcctgtttttgctcacccagaaacgctggtgaaagtaaaagatgctgaagatcagttgggtgcacgagtgggttacatcgaactggatctcaacagcggtaagatccttgagagttttcgccccgaagaacgttttccaatgatgagcacttttaaagttctgctatgtggcgcggtattatcccgtattgacgccgggcaagagcaactcggtcgccgcatacactattctcagaatgacttggttgagtactcaccagtcacagaaaagcatcttacggatggcatgacagtaagagaattatgcagtgctgccataaccatgagtgataacactgcggccaacttacttctgacaacgatcggaggaccgaaggagctaaccgcttttttgcacaacatgggggatcatgtaactcgccttgatcgttgggaaccggagctgaatgaagccataccaaacgacgagcgtgacaccacgatgcctgtagcaatggcaacaacgttgcgcaaactattaactggcgaactacttactctagcttcccggcaacaattaatagactggatggaggcggataaagttgcaggaccacttctgcgctcggcccttccggctggctggtttattgctgataaatctggagccggtgagcgtgggtcacgcggtatcattgcagcactggggccagatggtaagccctcccgtatcgtagttatctacacgacggggagtcaggcaactatggatgaacgaaatagacagatcgctgagataggtgcctcactgattaagcattggtaactgtcagaccaagtttactcataacgcgtcaattcgagggggatcaattccgtgataggtgggctgcccttcctggttggcttggtttcatcagccatccgcttgccctcatctgttacgccggcggtagccggccagcctcgcagagcaggattcccgttgagcaccgccaggtgcgaataagggacagtgaagaaggaacacccgctcgcgggtgggcctacttcacctatcctgcccggctgacgccgttggatacaccaaggaaagtctacacgaaccctttggcaaaatcctgtatatcgtgcgaaaaaggatggatataccgaaaaaatcgctataatgaccccgaagcagggttatgcagcggaaaacggaattgatccggccacgatgcgtccggcgtagaggatctgaagatcagcagttcaacctgttgatagtacgtactaagctctcatgtttcacgtactaagctctcatgtttaacgtactaagctctcatgtttaacgaactaaaccctcatggctaacgtactaagctctcatggctaacgtactaagctctcatgtttcacgtactaagctctcatgtttgaacaataaaattaatataaatcagcaacttaaatagcctctaaggttttaagttttataagaaaaaaaagaatatataaggcttttaaagcttttaaggtttaacggttgtggacaacaagccagg

SEQ ID NO: 74 - DNA, 13020 bp, synthetic construct
  misc_feature 1..13020: note = Description of sequence: pBH506
  source 1..13020: mol_type = other DNA
gatgtaacgcactgagaagcccttagagcctctcaaagcaattttgagtgacacaggaacacttaacggctgacatgggaattcccctccaccgcggtgtattaatgcggctgcccctgtacaaagaaaattcgacaaactgttatttttctatctatttatttgaattgtgagcggataacaattacctttgtcggcaattgtgagcggataacaattatgagtcaggctgatgagtccgtgaggacgaaacgagtaagctcgtccctgacatcacattaccagtgttttagagctagaaatagcaagttaaaataaggctagtccgttatcaacttgaaaaagtggcaccgagtcggtgcttttttggccggcatggtcccagcctcctcgctggcgccggctgggcaacatgcttcggcatggcgaatgggacgcactctaatcgttatcggagtgcttttagattactaatcaaattgcttctactaattgcctatcttccagtgatggaacagcatttgaacgcattggctgcaacaatcagccttgatctggaagaagcaatgaaagctgctgttaagtctccgaatcaggtattgttcctgacaggtgtattcccatccggtaaacgcggatactttgcagttgatctgactcaggaataaattataaattaaggtaagaagattgtaggataagctaatgaaatagaaaaaggatgccgtcacacaacttgtcggcattcttttttgttttattagttgaaaatatagtgaaaaagttgcctaaatatgtatgttaacaaattatttgtcgtaactttgcactccaaatctgtttttaacatatggcactagtgaaaccagtaacgttatacgatgtcgcagagtatgccggtgtctcttatcagaccgtttcccgcgtggtgaaccaggccagccacgtttctgcgaaaacgcgggaaaaagtggaagcggcgatggcggagctgaattacattcccaaccgcgtggcacaacaactggcgggcaaacagtcgttgctgattggcgttgccacctccagtctggccctgcacgcgccgtcgcaaattgtcgcggcgattaaatctcgcgccgatcaactgggtgccagcgtggtggtgtcgatggtagaacgaagcggcgtcgaagcctgtaaaacggcggtgcacaatcttctcgcgcaacgcgtcagtgggctgatcattaactatccgctggatgaccaggatgccattgctgtggaagctgcctgcactaatgttccggcgttatttcttgatgtctctgaccagacacccatcaacagtattattttctcccatgaagacggtacgcgactgggcgtggagcatctggtcgcattgggtcaccagcaaatcgcgctgttagcgggcccattaagttctgtctcggcgcgtctgcgtctggctggctggcataaatatctcactcgcaatcaaattcagccgatagcggaacgggaaggcgactggagtgccatgtccggttttcaacaaaccatgcaaatgctgaatgagggcatcgttcccactgcgatgctggttgccaacgatcagatggcgctgggcgcaatgcgcgccattaccgagtccgggctgcgcgttggtgcggatatctcggtagtgggatacgacgataccgaagacagctcatgttatatcccgccgttaaccaccatcaaacaggattttcgcctgctggggcaaaccagcgtggaccgcttgctgcaactctctcagggccaggcggtgaagggcaatcagctgttgcccgtctcactggtgaaaagaaaaaccaccctggcgcccaatacgcaaaccgcctctccccgcgcgttggccgattcattaatgcagctggcacgacaggtttcccgactggaaagcgggcagtgagctttcctcggtaccaaattccagaaaagaggcctcccgaaaggggggccttttttcgttttggtcctacttgtgcctgttctatttcctatgcggttcctggccttttgctggccttttgctcacatgttctttcctgcgttatcccctgattctgtggataaccgtattaccgcctttgagtgagctgatacatcccaaatgctgctcggtaccaaagacgaacaataagacgctgaaaagcgtcttttttcgttttggtccgataaagtttggaagataaagctaaaagttcttatctttgcagtccgaaataaagacatataaaagaaaagacaccatggataagaaatactcaataggcttagctatcggcacaaatagcgtcggatgggcggtgatcactgatgaatataaggttccgtctaaaaagttcaaggttctgggaaatacagaccgccacagtatcaaaaaaaatcttataggggctcttttatttgacagtggagagacagcggaagcgactcgtctcaaacggacagctcgtagaaggtatacacgtcggaagaatcgtatttgttatctacaggagattttttcaaatgagatggcgaaagtagatgatagtttctttcatcgacttgaagagtcttttttggtggaagaagacaagaagcatgaacgtcatcctatttttggaaatatagtagatgaagttgcttatcatgagaaatatccaactatctatcatctgcgaaaaaaattggtagattctactgataaagcggatttgcgcttaatctatttggccttagcgcatatgattaagtttcgtggtcattttttgattgagggagatttaaatcctgataatagtgatgtggacaaactatttatccagttggtacaaacctacaatcaattatttgaagaaaaccctattaacgcaagtggagtagatgctaaagcgattctttctgcacgattgagtaaatcaagacgattagaaaatctcattgctcagctccccggtgagaagaaaaatggcttatttgggaatctcattgctttgtcattgggtttgacccctaattttaaatcaaattttgatttggcagaagatgctaaattacagctttcaaaagatacttacgatgatgatttagataatttattggcgcaaattggagatcaatatgctgatttgtttttggcagctaagaatttatcagatgctattttactttcagatatcctaagagtaaatactgaaataactaaggctcccctatcagcttcaatgattaaacgctacgatgaacatcatcaagacttgactcttttaaaagctttagttcgacaacaacttccagaaaagtataaagaaatcttttttgatcaatcaaaaaacggatatgcaggttatattgatgggggagctagccaagaagaattttataaatttatcaaaccaattttagaaaaaatggatggtactgaggaattattggtgaaactaaatcgtgaagatttgctgcgcaagcaacggacctttgacaacggctctattccccatcaaattcacttgggtgagctgcatgctattttgagaagacaagaagacttttatccatttttaaaagacaatcgtgagaagattgaaaaaatcttgacttttcgaattccttattatgttggtccattggcgcgtggcaatagtcgttttgcatggatgactcggaagtctgaagaaacaattaccccatggaattttgaagaagttgtcgataaaggtgcttcagctcaatcatttattgaacgcatgacaaactttgataaaaatcttccaaatgaaaaagtactaccaaaacatagtttgctttatgagtattttacggtttataacgaattgacaaaggtcaaatatgttactgaaggaatgcgaaaaccagcatttctttcaggtgaacagaagaaagccattgttgatttactcttcaaaacaaatcgaaaagtaaccgttaagcaattaaaagaagattatttcaaaaaaatagaatgttttgatagtgttgaaatttcaggagttgaagatagatttaatgcttcattaggtacctaccatgatttgctaaaaattattaaagataaagattttttggataatgaagaaaatgaagatatcttagaggatattgttttaacattgaccttatttgaagatagggagatgattgaggaaagacttaaaacatatgctcacctctttgatgataaggtgatgaaacagcttaaacgtcgccgttatactggttggggacgtttgtctcgaaaattgattaatggtattagggataagcaatctggcaaaacaatattagattttttgaaatcagatggttttgccaatcgcaattttatgcagctgatccatgatgatagtttgacatttaaagaagacattcaaaaagcacaagtgtctggacaaggcgatagtttacatgaacatattgcaaatttagctggtagccctgctattaaaaaaggtattttacagactgtaaaagttgttgatgaattggtcaaagtaatggggcggcataagccagaaaatatcgttattgaaatggcacgtgaaaatcagacaactcaaaagggccagaaaaattcgcgagagcgtatgaaacgaatcgaagaaggtatcaaagaattaggaagtcagattcttaaagagcatcctgttgaaaatactcaattgcaaaatgaaaagctctatctctattatctccaaaatggaagagacatgtatgtggaccaagaattagatattaatcgtttaagtgattatgatgtcgatgccattgttccacaaagtttccttaaagacgattcaatagacaataaggtcttaacgcgttctgataaaaatcgtggtaaatcggataacgttccaagtgaagaagtagtcaaaaagatgaaaaactattggagacaacttctaaacgccaagttaatcactcaacgtaagtttgataatttaacgaaagctgaacgtggtggtttgagtgaacttgataaagctggttttatcaaacgccaattggttgaaactcgccaaatcactaagcatgtggcacaaattttggatagtcgcatgaatactaaatacgatgaaaatgataaacttattcgagaggttaaagtgattaccttaaaatctaaattagtttctgacttccgaaaagatttccaattctataaagtacgtgagattaacaattaccatcatgcccatgatgcgtatctaaatgccgtcgttggaactgctttgattaagaaatatccaaaacttgaatcggagtttgtctatggtgattataaagtttatgatgttcgtaaaatgattgctaagtctgagcaagaaataggcaaagcaaccgcaaaatatttcttttactctaatatcatgaacttcttcaaaacagaaattacacttgcaaatggagagattcgcaaacgccctctaatcgaaactaatggggaaactggagaaattgtctgggataaagggcgagattttgccacagtgcgcaaagtattgtccatgccccaagtcaatattgtcaagaaaacagaagtacagacaggcgaattctccaaggagtcaattttaccaaaaagaaattcggacaagcttattgctcgtaaaaaagactgggatccaaaaaaatatggtggttttgatagtccaacggtagcttattcagtcctagtggttgctaaggtggaaaaagggaaatcgaagaagttaaaatccgttaaagagttactagggatcacaattatggaaagaagttcctttgaaaaaaatccgattgactttttagaagctaaaggatataaggaagttaaaaaagacttaatcattaaactacctaaatatagtctttttgagttagaaaacggtcgtaaacggatgctggctagtgccggagaattacaaaaaggaaatgagctggctctgccaagcaaatatgtgaattttttatatttagctagtcattatgaaaagttgaagggtagtccagaagataacgaacaaaaacaattgtttgtggagcagcataagcattatttagatgagattattgagcaaatcagtgaattttctaagcgtgttattttagcagatgccaatttagataaagttcttagtgcatataacaaacatagagacaaaccaatacgtgaacaagcagaaaatattattcatttatttacgttgacgaatcttggagctcccgctgcttttaaatattttgatacaacaattgatcgtaaacgatatacgtctacaaaagaagttttagatgccactcttatccatcaatccatcactggtctttatgaaacacgcattgatttgagtcagctaggaggtgactgattctttgtacccgataattgcctatcttccagtgatggaacagcatttgtgcattggctgcaacaatcagccttacttgtgcctgttctatttccgaaccgaccgcttgtatgaatgcatcaaaattcgttttctctacgttggattccttgttgctcatattgtgatgataatttctacaaatatagtcattggtaactatctatgaaactgtttgatacttttatcagtctaatagttttacaaggtctttcttcatttcttcgtcaatatccctgtatcgtctgaaagctttgcttccctccttgtgtcccgacagtgcggaaacaaggttcgggtctttcacttttttatagatattgccgataaacgtacgtcttgccagatggctgcttgccacttcataaataggtcgtttgatttcgttgtgcgtcaacgggtctaagattgttacgatgcggtcaactccagctaatttgaatatcttttttatggcatcattgtacttttgctcggatatgaacggcaacagttttccctcatattctttgtagcgttcaaggatttctttcgctttgtcgttaagtggaacacgtaccgtaaccggattcccctctttggttttcttgggaatatattctatggcttcattgaccacatttagtttggtcattcggtacaggtcgctcaccctgcatcctatcagtgtctgaaatatgaatatatccctctgtattgccagttgtggggtggcagaaaggtctgcattaaaaatcctgtccctttcttcgagtgttatataataaggtgtaccatatgtacactcctctatcggaaacttgtcgaaaggtctgtttgtggtgcgtttgttatcgaagcaccacaggaagaatgtgcgtattcttgaaaaacagtctatcagcgtgtttttgcttctgggctgtggtgtcctcttttcgggaatggcttcataaatgctcgggtaaagttcataatactggtattcgttctgaaagaaatcccacatatcccgaagcgtgtcaggtgttaccaaatccacatcaaggataaagcccttttgtcctctctttgtagcccttacatatagttcataacgcagtaaggctcttttgacaacccggaaatttttctttcgtacttccgacaaagggtgcttgtttagaaattcatcgaatagttctccaatggtaggcttgataaccacttcctccggcaaaaaatatttttcaggatggtaaaatttatcaagtgttgtttttagccattctttgtctattgcttccttttcttgttgatataccttctcgatataggttttcaactggcgtatctcttcatttatatgggtacgcatttcttcattgcagacagctttcgtttttacacattcgtctttatcatcccatagattgggattgatggctaactgagtaggagcaacggagtctaactgccttccgtttctaaaacggacatagattgtagccatggattctgtatcatatcgtttggctgcttttttaatgataaaggttactttcatagactttcaggttgaattttactctgctgcaaatataaatattttccccagcattttccccacatctgctaaatattttgcaattcgattaaacttggattaaaatttaataggattataacatattgaaatacagtgtaattgtggcgtttttccgcatttttctttttacccacattttccccactttaattatttcaaatgcggggtctgggtacaagaaagaaagctaagtatttgatagttcaatacttagctttttcttttgcttgaattttccccacattttccccacacgtgcaaaaaatatagcagtaagtcattatttcttttggttgaacgtagagagtagcgatattaaaagaatccgatgagaaaagactaatatttatctatccattcagtttgatttttcaggactttacatcgtcctgaaagtatttgttggtaccggtaccgaggacgcgtaaacatttacagttgcatgtggcctattgtttaggacgcgttatctccttaacgtacgttttcgttccattggccctcaaaccccgttatatacattcatgtccatttatgtaaaaaatcctgctgaccttgtttatgtcttgtcagtcaccatttgcaaaaccatatttgaccctcaaagaggctgaatttgataagcaacttgctacatactcataataaggagctaaatagaacacgaatgggaaatactcaaatgccaaactaaagaagatattggccaaaataaacgctataccgagagagaaacttgatttttcaacttcctaaccaacagtgttgttcaaacatttctacttatttgtacttaccagttgaacctacgtttccctaataaaatgtctatggtaaaaagttaaaaaatcctcctacttttgttagatatatttttttgtgtaattttgtaatcgttatgcggcagtaataatatacatattaatacgagttaggaatcctgtagttctcatatgctacgaggaggtattaaaaggtgcgtttcgacaatgcatctattgtagtatattattgcttaatccaaatgaatattataaatttaggaattcttgctcacattgatgcaggaaaaacttccgtaaccgagaatctgctgtttgccagtggagcaacggaaaagtgcggctgtgtggataatggtgacaccataacggactctatggatatagagaaacgtagaggaattactgttcgggcttctacgacatctattatctggaatggtgtgaaatgcaatatcattgacactccgggacacatggattttattgcggaagtggagcggacattcaaaatgcttgatggagcagtcctcatcttatccgcaaaggaaggcatacaagcgcagacaaagttgctgttcaatactttacagaagctgcaaatcccgacaattatatttatcaataagattgaccgagccggtgtgaatttggagcgtttgtatctggatataaaagcaaatctgtctcaagatgtcctgtttatgcaaaatgttgtcgatggatcggtttatccggtttgctcccaaacatatataaaggaagaatacaaagaatttgtatgcaaccatgacgacaatatattagaacgatatttggcggatagcgaaatttcaccggctgattattggaatacgataatcgctcttgtggcaaaagccaaagtctatccggtgctacatggatcagcaatgttcaatatcggtatcaatgagttgttggacgccatcacttcttttatacttcctccggcatcggtctcaaacagactttcatcttatctttataagatagagcatgaccccaaaggacataaaagaagttttctaaaaataattgacggaagtctgagacttcgagacgttgtaagaatcaacgattcggaaaaattcatcaagattaaaaatctaaaaactatcaatcagggcagagagataaatgttgatgaagtgggcgccaatgatatcgcgattgtagaggatatggatgattttcgaatcggaaattatttaggtgctgaaccttgtttgattcaaggattatcgcatcagcatcccgctctcaaatcctccgtccggccagacaggcccgaagagagaagcaaggtgatatccgctctgaatacattgtggattgaagacccgtctttgtccttttccataaactcatatagtgatgaattggaaatctcgttatatggtttaacccaaaaggaaatcatacagacattgctggaagaacgattttccgtaaaggtccattttgatgagatcaagactatatacaaagaacgacctgtaaaaaaggtcaataagattattcagatcgaagtgccgcccaacccttattgggccacaatagggctgactcttgaacccttaccgttagggacagggttgcaaatcgaaagtgacatctcctatggttatctgaaccattcttttcaaaatgccgtttttgaagggattcgtatgtcttgccaatccgggttacatggatgggaagtgactgatctgaaagtaacttttactcaagccgagtattatagcccggtaagtacacctgctgatttcagacagctgaccccttatgtcttcaggctggccttgcaacagtcaggtgtggacattctcgaaccgatgctctattttgagttgcagataccccaagcggcaagttccaaagctattacagatttgcaaaaaatgatgtctgagattgaagacatcagttgcaataatgagtggtgtcatattaaagggaaagttccattaaatacaagtaaagactatgcatcagaagtaagttcatacactaagggcttaggcatttttatggttaagccatgcgggtatcaaataacaaaaggcggttattctgataatatccgcatgaacgaaaaagataaacttttattcatgttccaaaaatcaatgtcatcaaaataatggtataacctctccttaatttattgcatctcttttcgaatatttatgttttttgagaaaagaacgtactcatggttcatcccgatatgcgtatcggtctgtatatcagcaactttctatgtgtttcaactacaatagtcatctattctcatctttctgagtccaccccctgcaaagcccctctttacgacataaaaattcggtcggaaaaggtatgcaaaagatgtttctctctttaagagaaactcttcgggatgcaaaaatatgaaaataactccaattcaccaaattatatagcgacttttttacaaaatgctaaaatttgttgatttccgtcaagcaattgttgagcaaaaatgtcttttacgataaaatgatacctcaatatcaactgtttagcaaaacgatatttctcttaaagagagaaacacctttttgttcaccaatccccgacttttaatcccgcggccatgattgaaaaaggaagagtatgagtattcaacatttccgtgtcgcccttattcccttttttgcggcattttgccttcctgtttttgctcacccagaaacgctggtgaaagtaaaagatgctgaagatcagttgggtgcacgagtgggttacatcgaactggatctcaacagcggtaagatccttgagagttttcgccccgaagaacgttttccaatgatgagcacttttaaagttctgctatgtggcgcggtattatcccgtattgacgccgggcaagagcaactcggtcgccgcatacactattctcagaatgacttggttgagtactcaccagtcacagaaaagcatcttacggatggcatgacagtaagagaattatgcagtgctgccataaccatgagtgataacactgcggccaacttacttctgacaacgatcggaggaccgaaggagctaaccgcttttttgcacaacatgggggatcatgtaactcgccttgatcgttgggaaccggagctgaatgaagccataccaaacgacgagcgtgacaccacgatgcctgtagcaatggcaacaacgttgcgcaaactattaactggcgaactacttactctagcttcccggcaacaattaatagactggatggaggcggataaagttgcaggaccacttctgcgctcggcccttccggctggctggtttattgctgataaatctggagccggtgagcgtgggtcacgcggtatcattgcagcactggggccagatggtaagccctcccgtatcgtagttatctacacgacggggagtcaggcaactatggatgaacgaaatagacagatcgctgagataggtgcctcactgattaagcattggtaactgtcagaccaagtttactcataacgcgtcaattcgagggggatcaattccgtgataggtgggctgcccttcctggttggcttggtttcatcagccatccgcttgccctcatctgttacgccggcggtagccggccagcctcgcagagcaggattcccgttgagcaccgccaggtgcgaataagggacagtgaagaaggaacacccgctcgcgggtgggcctacttcacctatcctgcccggctgacgccgttggatacaccaaggaaagtctacacgaaccctttggcaaaatcctgtatatcgtgcgaaaaaggatggatataccgaaaaaatcgctataatgaccccgaagcagggttatgcagcggaaaacggaattgatccggccacgatgcgtccggcgtagaggatctgaagatcagcagttcaacctgttgatagtacgtactaagctctcatgtttcacgtactaagctctcatgtttaacgtactaagctctcatgtttaacgaactaaaccctcatggctaacgtactaagctctcatggctaacgtactaagctctcatgtttcacgtactaagctctcatgtttgaacaataaaattaatataaatcagcaacttaaatagcctctaaggttttaagttttataagaaaaaaaagaatatataaggcttttaaagcttttaaggtttaacggttgtggacaacaagccagg

SEQ ID NO: 75 - DNA, 13053 bp, synthetic construct
  misc_feature 1..13053: note = Description of sequence: pBH507
  source 1..13053: mol_type = other DNA
gatgtaacgcactgagaagcccttagagcctctcaaagcaattttgagtgacacaggaacacttaacggctgacatgggaattcccctccaccgcggtgtattaatgcggctgcccctgtacaaagaaaattcgacaaactgttatttttctatctatttatttgaattgtgagcggataacaattacctttgtcggcaattgtgagcggataacaattatgagtcaggctgatgagtccgtgaggacgaaacgagtaagctcgtccctgacatcacattaccagtgttttagagctagaaatagcaagttaaaataaggctagtccgttatcaacttgaaaaagtggcaccgagtcggtgcttttttggccggcatggtcccagcctcctcgctggcgccggctgggcaacatgcttcggcatggcgaatgggacgcactctaatcgttatcggagtgcttttagattactaatcaaattgcttctactaattgcctatcttccagtgatggaacagcatttgaacgcattggctgcaacaatcagccttgatctggaagaagcaatgaaagctgctgttaagtctccgaatcaggtattgttcctgacaggtgtattcccatccggtaaacgcggatactttgcagttgatctgactcaggaataaattataaattaaggtaagaagattgtaggataagctaatgaaatagaaaaaggatgccgtcacacaacttgtcggcattcttttttgttttattagttgaaaatatagtgaaaaagttgcctaaatatgtatgttaacaaattatttgtcgtaactttgcactccaaatctgtttttaacatatggcactagtgaaaccagtaacgttatacgatgtcgcagagtatgccggtgtctcttatcagaccgtttcccgcgtggtgaaccaggccagccacgtttctgcgaaaacgcgggaaaaagtggaagcggcgatggcggagctcaattacattcccaaccgcgtggcacaacaactggcgggcaaagcgtcgcataccattggcatgttgatcactgccagtaccaatcctttctattcagaactggtgcgtggcgttgaacgcagctgcttcgaacgcggttatagtctcgtcctttgcaataccgaaggcgatgaacagcggatgaatcgcaatctggaaacgctgatgcaaaaacgcgttgatggcttgctgttactgtgcaccgaaacgcatcaaccttcgcgtgaaatcatgcaacgttatccgacagtgcctactgtgatgatggactgggctccgttcgatggcgacagcgatcttattcaggataactcgttgctgggcggagacttagcaacgcaatatctgatcgataaaggtcatacccgtatcgcctgtattaccggcccgctggataaaactccggcgcgcctgcggttggaaggttatcgggcggcgatgaaacgtgcgggtctcaacattcctgatggctatgaagtcactggtgattttgaatttaacggcgggtttgacgctatgcgccaactgctatcacatccgctgcgtcctcaggccgtctttaccggaaatgacgctatggctgttggcgtttaccaggcgttatatcaggcagagttacaggttccgcaggatatcgcggtgattggctatgacgatatcgaactggcaagctttatgacgccaccattaaccactatccaccaaccgaaagatgaactgggggagctggcgattgatgtactcatccatcggataacccagccgacccttcagcaacaacgattacaacttactccgattctgatggaacgcggttcggcttagctggtgaaaagaaaaaccaccctggcgcccaatacgcaaaccgcctctccccgcgcgttggccgattcattaatgcagctggcacgacaggtttcccgactggaaagcgggcagtgagctttcctcggtaccaaattccagaaaagaggcctcccgaaaggggggccttttttcgttttggtcctacttgtgcctgttctatttcctatgcggttcctggccttttgctggccttttgctcacatgttctttcctgcgttatcccctgattctgtggataaccgtattaccgcctttgagtgagctgatacatcccaaatgctgctcggtaccaaagacgaacaataagacgctgaaaagcgtcttttttcgttttggtccgataaagtttggaagataaagctaaaagttcttatctttgcagtccgaaataaagacatataaaagaaaagacaccatggataagaaatactcaataggcttagctatcggcacaaatagcgtcggatgggcggtgatcactgatgaatataaggttccgtctaaaaagttcaaggttctgggaaatacagaccgccacagtatcaaaaaaaatcttataggggctcttttatttgacagtggagagacagcggaagcgactcgtctcaaacggacagctcgtagaaggtatacacgtcggaagaatcgtatttgttatctacaggagattttttcaaatgagatggcgaaagtagatgatagtttctttcatcgacttgaagagtcttttttggtggaagaagacaagaagcatgaacgtcatcctatttttggaaatatagtagatgaagttgcttatcatgagaaatatccaactatctatcatctgcgaaaaaaattggtagattctactgataaagcggatttgcgcttaatctatttggccttagcgcatatgattaagtttcgtggtcattttttgattgagggagatttaaatcctgataatagtgatgtggacaaactatttatccagttggtacaaacctacaatcaattatttgaagaaaaccctattaacgcaagtggagtagatgctaaagcgattctttctgcacgattgagtaaatcaagacgattagaaaatctcattgctcagctccccggtgagaagaaaaatggcttatttgggaatctcattgctttgtcattgggtttgacccctaattttaaatcaaattttgatttggcagaagatgctaaattacagctttcaaaagatacttacgatgatgatttagataatttattggcgcaaattggagatcaatatgctgatttgtttttggcagctaagaatttatcagatgctattttactttcagatatcctaagagtaaatactgaaataactaaggctcccctatcagcttcaatgattaaacgctacgatgaacatcatcaagacttgactcttttaaaagctttagttcgacaacaacttccagaaaagtataaagaaatcttttttgatcaatcaaaaaacggatatgcaggttatattgatgggggagctagccaagaagaattttataaatttatcaaaccaattttagaaaaaatggatggtactgaggaattattggtgaaactaaatcgtgaagatttgctgcgcaagcaacggacctttgacaacggctctattccccatcaaattcacttgggtgagctgcatgctattttgagaagacaagaagacttttatccatttttaaaagacaatcgtgagaagattgaaaaaatcttgacttttcgaattccttattatgttggtccattggcgcgtggcaatagtcgttttgcatggatgactcggaagtctgaagaaacaattaccccatggaattttgaagaagttgtcgataaaggtgcttcagctcaatcatttattgaacgcatgacaaactttgataaaaatcttccaaatgaaaaagtactaccaaaacatagtttgctttatgagtattttacggtttataacgaattgacaaaggtcaaatatgttactgaaggaatgcgaaaaccagcatttctttcaggtgaacagaagaaagccattgttgatttactcttcaaaacaaatcgaaaagtaaccgttaagcaattaaaagaagattatttcaaaaaaatagaatgttttgatagtgttgaaatttcaggagttgaagatagatttaatgcttcattaggtacctaccatgatttgctaaaaattattaaagataaagattttttggataatgaagaaaatgaagatatcttagaggatattgttttaacattgaccttatttgaagatagggagatgattgaggaaagacttaaaacatatgctcacctctttgatgataaggtgatgaaacagcttaaacgtcgccgttatactggttggggacgtttgtctcgaaaattgattaatggtattagggataagcaatctggcaaaacaatattagattttttgaaatcagatggttttgccaatcgcaattttatgcagctgatccatgatgatagtttgacatttaaagaagacattcaaaaagcacaagtgtctggacaaggcgatagtttacatgaacatattgcaaatttagctggtagccctgctattaaaaaaggtattttacagactgtaaaagttgttgatgaattggtcaaagtaatggggcggcataagccagaaaatatcgttattgaaatggcacgtgaaaatcagacaactcaaaagggccagaaaaattcgcgagagcgtatgaaacgaatcgaagaaggtatcaaagaattaggaagtcagattcttaaagagcatcctgttgaaaatactcaattgcaaaatgaaaagctctatctctattatctccaaaatggaagagacatgtatgtggaccaagaattagatattaatcgtttaagtgattatgatgtcgatgccattgttccacaaagtttccttaaagacgattcaatagacaataaggtcttaacgcgttctgataaaaatcgtggtaaatcggataacgttccaagtgaagaagtagtcaaaaagatgaaaaactattggagacaacttctaaacgccaagttaatcactcaacgtaagtttgataatttaacgaaagctgaacgtggtggtttgagtgaacttgataaagctggttttatcaaacgccaattggttgaaactcgccaaatcactaagcatgtggcacaaattttggatagtcgcatgaatactaaatacgatgaaaatgataaacttattcgagaggttaaagtgattaccttaaaatctaaattagtttctgacttccgaaaagatttccaattctataaagtacgtgagattaacaattaccatcatgcccatgatgcgtatctaaatgccgtcgttggaactgctttgattaagaaatatccaaaacttgaatcggagtttgtctatggtgattataaagtttatgatgttcgtaaaatgattgctaagtctgagcaagaaataggcaaagcaaccgcaaaatatttcttttactctaatatcatgaacttcttcaaaacagaaattacacttgcaaatggagagattcgcaaacgccctctaatcgaaactaatggggaaactggagaaattgtctgggataaagggcgagattttgccacagtgcgcaaagtattgtccatgccccaagtcaatattgtcaagaaaacagaagtacagacaggcgaattctccaaggagtcaattttaccaaaaagaaattcggacaagcttattgctcgtaaaaaagactgggatccaaaaaaatatggtggttttgatagtccaacggtagcttattcagtcctagtggttgctaaggtggaaaaagggaaatcgaagaagttaaaatccgttaaagagttactagggatcacaattatggaaagaagttcctttgaaaaaaatccgattgactttttagaagctaaaggatataaggaagttaaaaaagacttaatcattaaactacctaaatatagtctttttgagttagaaaacggtcgtaaacggatgctggctagtgccggagaattacaaaaaggaaatgagctggctctgccaagcaaatatgtgaattttttatatttagctagtcattatgaaaagttgaagggtagtccagaagataacgaacaaaaacaattgtttgtggagcagcataagcattatttagatgagattattgagcaaatcagtgaattttctaagcgtgttattttagcagatgccaatttagataaagttcttagtgcatataacaaacatagagacaaaccaatacgtgaacaagcagaaaatattattcatttatttacgttgacgaatcttggagctcccgctgcttttaaatattttgatacaacaattgatcgtaaacgatatacgtctacaaaagaagttttagatgccactcttatccatcaatccatcactggtctttatgaaacacgcattgatttgagtcagctaggaggtgactgattctttgtacccgataattgcctatcttccagtgatggaacagcatttgtgcattggctgcaacaatcagccttacttgtgcctgttctatttccgaaccgaccgcttgtatgaatgcatcaaaattcgttttctctacgttggattccttgttgctcatattgtgatgataatttctacaaatatagtcattggtaactatctatgaaactgtttgatacttttatcagtctaatagttttacaaggtctttcttcatttcttcgtcaatatccctgtatcgtctgaaagctttgcttccctccttgtgtcccgacagtgcggaaacaaggttcgggtctttcacttttttatagatattgccgataaacgtacgtcttgccagatggctgcttgccacttcataaataggtcgtttgatttcgttgtgcgtcaacgggtctaagattgttacgatgcggtcaactccagctaatttgaatatcttttttatggcatcattgtacttttgctcggatatgaacggcaacagttttccctcatattctttgtagcgttcaaggatttctttcgctttgtcgttaagtggaacacgtaccgtaaccggattcccctctttggttttcttgggaatatattctatggcttcattgaccacatttagtttggtcattcggtacaggtcgctcaccctgcatcctatcagtgtctgaaatatgaatatatccctctgtattgccagttgtggggtggcagaaaggtctgcattaaaaatcctgtccctttcttcgagtgttatataataaggtgtaccatatgtacactcctctatcggaaacttgtcgaaaggtctgtttgtggtgcgtttgttatcgaagcaccacaggaagaatgtgcgtattcttgaaaaacagtctatcagcgtgtttttgcttctgggctgtggtgtcctcttttcgggaatggcttcataaatgctcgggtaaagttcataatactggtattcgttctgaaagaaatcccacatatcccgaagcgtgtcaggtgttaccaaatccacatcaaggataaagcccttttgtcctctctttgtagcccttacatatagttcataacgcagtaaggctcttttgacaacccggaaatttttctttcgtacttccgacaaagggtgcttgtttagaaattcatcgaatagttctccaatggtaggcttgataaccacttcctccggcaaaaaatatttttcaggatggtaaaatttatcaagtgttgtttttagccattctttgtctattgcttccttttcttgttgatataccttctcgatataggttttcaactggcgtatctcttcatttatatgggtacgcatttcttcattgcagacagctttcgtttttacacattcgtctttatcatcccatagattgggattgatggctaactgagtaggagcaacggagtctaactgccttccgtttctaaaacggacatagattgtagccatggattctgtatcatatcgtttggctgcttttttaatgataaaggttactttcatagactttcaggttgaattttactctgctgcaaatataaatattttccccagcattttccccacatctgctaaatattttgcaattcgattaaacttggattaaaatttaataggattataacatattgaaatacagtgtaattgtggcgtttttccgcatttttctttttacccacattttccccactttaattatttcaaatgcggggtctgggtacaagaaagaaagctaagtatttgatagttcaatacttagctttttcttttgcttgaattttccccacattttccccacacgtgcaaaaaatatagcagtaagtcattatttcttttggttgaacgtagagagtagcgatattaaaagaatccgatgagaaaagactaatatttatctatccattcagtttgatttttcaggactttacatcgtcctgaaagtatttgttggtaccggtaccgaggacgcgtaaacatttacagttgcatgtggcctattgtttaggacgcgttatctccttaacgtacgttttcgttccattggccctcaaaccccgttatatacattcatgtccatttatgtaaaaaatcctgctgaccttgtttatgtcttgtcagtcaccatttgcaaaaccatatttgaccctcaaagaggctgaatttgataagcaacttgctacatactcataataaggagctaaatagaacacgaatgggaaatactcaaatgccaaactaaagaagatattggccaaaataaacgctataccgagagagaaacttgatttttcaacttcctaaccaacagtgttgttcaaacatttctacttatttgtacttaccagttgaacctacgtttccctaataaaatgtctatggtaaaaagttaaaaaatcctcctacttttgttagatatatttttttgtgtaattttgtaatcgttatgcggcagtaataatatacatattaatacgagttaggaatcctgtagttctcatatgctacgaggaggtattaaaaggtgcgtttcgacaatgcatctattgtagtatattattgcttaatccaaatgaatattataaatttaggaattcttgctcacattgatgcaggaaaaacttccgtaaccgagaatctgctgtttgccagtggagcaacggaaaagtgcggctgtgtggataatggtgacaccataacggactctatggatatagagaaacgtagaggaattactgttcgggcttctacgacatctattatctggaatggtgtgaaatgcaatatcattgacactccgggacacatggattttattgcggaagtggagcggacattcaaaatgcttgatggagcagtcctcatcttatccgcaaaggaaggcatacaagcgcagacaaagttgctgttcaatactttacagaagctgcaaatcccgacaattatatttatcaataagattgaccgagccggtgtgaatttggagcgtttgtatctggatataaaagcaaatctgtctcaagatgtcctgtttatgcaaaatgttgtcgatggatcggtttatccggtttgctcccaaacatatataaaggaagaatacaaagaatttgtatgcaaccatgacgacaatatattagaacgatatttggcggatagcgaaatttcaccggctgattattggaatacgataatcgctcttgtggcaaaagccaaagtctatccggtgctacatggatcagcaatgttcaatatcggtatcaatgagttgttggacgccatcacttcttttatacttcctccggcatcggtctcaaacagactttcatcttatctttataagatagagcatgaccccaaaggacataaaagaagttttctaaaaataattgacggaagtctgagacttcgagacgttgtaagaatcaacgattcggaaaaattcatcaagattaaaaatctaaaaactatcaatcagggcagagagataaatgttgatgaagtgggcgccaatgatatcgcgattgtagaggatatggatgattttcgaatcggaaattatttaggtgctgaaccttgtttgattcaaggattatcgcatcagcatcccgctctcaaatcctccgtccggccagacaggcccgaagagagaagcaaggtgatatccgctctgaatacattgtggattgaagacccgtctttgtccttttccataaactcatatagtgatgaattggaaatctcgttatatggtttaacccaaaaggaaatcatacagacattgctggaagaacgattttccgtaaaggtccattttgatgagatcaagactatatacaaagaacgacctgtaaaaaaggtcaataagattattcagatcgaagtgccgcccaacccttattgggccacaatagggctgactcttgaacccttaccgttagggacagggttgcaaatcgaaagtgacatctcctatggttatctgaaccattcttttcaaaatgccgtttttgaagggattcgtatgtcttgccaatccgggttacatggatgggaagtgactgatctgaaagtaacttttactcaagccgagtattatagcccggtaagtacacctgctgatttcagacagctgaccccttatgtcttcaggctggccttgcaacagtcaggtgtggacattctcgaaccgatgctctattttgagttgcagataccccaagcggcaagttccaaagctattacagatttgcaaaaaatgatgtctgagattgaagacatcagttgcaataatgagtggtgtcatattaaagggaaagttccattaaatacaagtaaagactatgcatcagaagtaagttcatacactaagggcttaggcatttttatggttaagccatgcgggtatcaaataacaaaaggcggttattctgataatatccgcatgaacgaaaaagataaacttttattcatgttccaaaaatcaatgtcatcaaaataatggtataacctctccttaatttattgcatctcttttcgaatatttatgttttttgagaaaagaacgtactcatggttcatcccgatatgcgtatcggtctgtatatcagcaactttctatgtgtttcaactacaatagtcatctattctcatctttctgagtccaccccctgcaaagcccctctttacgacataaaaattcggtcggaaaaggtatgcaaaagatgtttctctctttaagagaaactcttcgggatgcaaaaatatgaaaataactccaattcaccaaattatatagcgacttttttacaaaatgctaaaatttgttgatttccgtcaagcaattgttgagcaaaaatgtcttttacgataaaatgatacctcaatatcaactgtttagcaaaacgatatttctcttaaagagagaaacacctttttgttcaccaatccccgacttttaatcccgcggccatgattgaaaaaggaagagtatgagtattcaacatttccgtgtcgcccttattcccttttttgcggcattttgccttcctgtttttgctcacccagaaacgctggtgaaagtaaaagatgctgaagatcagttgggtgcacgagtgggttacatcgaactggatctcaacagcggtaagatccttgagagttttcgccccgaagaacgttttccaatgatgagcacttttaaagttctgctatgtggcgcggtattatcccgtattgacgccgggcaagagcaactcggtcgccgcatacactattctcagaatgacttggttgagtactcaccagtcacagaaaagcatcttacggatggcatgacagtaagagaattatgcagtgctgccataaccatgagtgataacactgcggccaacttacttctgacaacgatcggaggaccgaaggagctaaccgcttttttgcacaacatgggggatcatgtaactcgccttgatcgttgggaaccggagctgaatgaagccataccaaacgacgagcgtgacaccacgatgcctgtagcaatggcaacaacgttgcgcaaactattaactggcgaactacttactctagcttcccggcaacaattaatagactggatggaggcggataaagttgcaggaccacttctgcgctcggcccttccggctggctggtttattgctgataaatctggagccggtgagcgtgggtcacgcggtatcattgcagcactggggccagatggtaagccctcccgtatcgtagttatctacacgacggggagtcaggcaactatggatgaacgaaatagacagatcgctgagataggtgcctcactgattaagcattggtaactgtcagaccaagtttactcataacgcgtcaattcgagggggatcaattccgtgataggtgggctgcccttcctggttggcttggtttcatcagccatccgcttgccctcatctgttacgccggcggtagccggccagcctcgcagagcaggattcccgttgagcaccgccaggtgcgaataagggacagtgaagaaggaacacccgctcgcgggtgggcctacttcacctatcctgcccggctgacgccgttggatacaccaaggaaagtctacacgaaccctttggcaaaatcctgtatatcgtgcgaaaaaggatggatataccgaaaaaatcgctataatgaccccgaagcagggttatgcagcggaaaacggaattgatccggccacgatgcgtccggcgtagaggatctgaagatcagcagttcaacctgttgatagtacgtactaagctctcatgtttcacgtactaagctctcatgtttaacgtactaagctctcatgtttaacgaactaaaccctcatggctaacgtactaagctctcatggctaacgtactaagctctcatgtttcacgtactaagctctcatgtttgaacaataaaattaatataaatcagcaacttaaatagcctctaaggttttaagttttataagaaaaaaaagaatatataaggcttttaaagcttttaaggtttaacggttgtggacaacaagccagg

SEQ ID NO: 76 - DNA, 13020 bp, synthetic construct
  misc_feature 1..13020: note = Description of sequence: pBH508
  source 1..13020: mol_type = other DNA
gatgtaacgcactgagaagcccttagagcctctcaaagcaattttgagtgacacaggaacacttaacggctgacatgggaattcccctccaccgcggtgtattaatgcggctgcccctgtacaaagaaaattcgacaaactgttatttttctatctatttatttgaattgtgagcggataacaattacctttgtcggcaattgtgagcggataacaattatgagttgacctgatgagtccgtgaggacgaaacgagtaagctcgtcgtcaactcaatgcgtaaagtgttttagagctagaaatagcaagttaaaataaggctagtccgttatcaacttgaaaaagtggcaccgagtcggtgcttttttggccggcatggtcccagcctcctcgctggcgccggctgggcaacatgcttcggcatggcgaatgggacgcactctaatcgttatcggagtgcttttagattactaatcaaattgcttctactaattgcctatcttccagtgatggaacagcatttgaacgcattggctgcaacaatcagccttgatctggaagaagcaatgaaagctgctgttaagtctccgaatcaggtattgttcctgacaggtgtattcccatccggtaaacgcggatactttgcagttgatctgactcaggaataaattataaattaaggtaagaagattgtaggataagctaatgaaatagaaaaaggatgccgtcacacaacttgtcggcattcttttttgttttattagttgaaaatatagtgaaaaagttgcctaaatatgtatgttaacaaattatttgtcgtaactttgcactccaaatctgtttttaacatatggcactagtgaaaccagtaacgttatacgatgtcgcagagtatgccggtgtctcttatcagaccgtttcccgcgtggtgaaccaggccagccacgtttctgcgaaaacgcgggaaaaagtggaagcggcgatggcggagctgaattacattcccaaccgcgtggcacaacaactggcgggcaaacagtcgttgctgattggcgttgccacctccagtctggccctgcacgcgccgtcgcaaattgtcgcggcgattaaatctcgcgccgatcaactgggtgccagcgtggtggtgtcgatggtagaacgaagcggcgtcgaagcctgtaaaacggcggtgcacaatcttctcgcgcaacgcgtcagtgggctgatcattaactatccgctggatgaccaggatgccattgctgtggaagctgcctgcactaatgttccggcgttatttcttgatgtctctgaccagacacccatcaacagtattattttctcccatgaagacggtacgcgactgggcgtggagcatctggtcgcattgggtcaccagcaaatcgcgctgttagcgggcccattaagttctgtctcggcgcgtctgcgtctggctggctggcataaatatctcactcgcaatcaaattcagccgatagcggaacgggaaggcgactggagtgccatgtccggttttcaacaaaccatgcaaatgctgaatgagggcatcgttcccactgcgatgctggttgccaacgatcagatggcgctgggcgcaatgcgcgccattaccgagtccgggctgcgcgttggtgcggatatctcggtagtgggatacgacgataccgaagacagctcatgttatatcccgccgttaaccaccatcaaacaggattttcgcctgctggggcaaaccagcgtggaccgcttgctgcaactctctcagggccaggcggtgaagggcaatcagctgttgcccgtctcactggtgaaaagaaaaaccaccctggcgcccaatacgcaaaccgcctctccccgcgcgttggccgattcattaatgcagctggcacgacaggtttcccgactggaaagcgggcagtgagctttcctcggtaccaaattccagaaaagaggcctcccgaaaggggggccttttttcgttttggtcctacttgtgcctgttctatttcctatgcggttcctggccttttgctggccttttgctcacatgttctttcctgcgttatcccctgattctgtggataaccgtattaccgcctttgagtgagctgatacatcccaaatgctgctcggtaccaaagacgaacaataagacgctgaaaagcgtcttttttcgttttggtccgataaagtttggaagataaagctaaaagttcttatctttgcagtccgaaataaagacatataaaagaaaagacaccatggataagaaatactcaataggcttagctatcggcacaaatagcgtcggatgggcggtgatcactgatgaatataaggttccgtctaaaaagttcaaggttctgggaaatacagaccgccacagtatcaaaaaaaatcttataggggctcttttatttgacagtggagagacagcggaagcgactcgtctcaaacggacagctcgtagaaggtatacacgtcggaagaatcgtatttgttatctacaggagattttttcaaatgagatggcgaaagtagatgatagtttctttcatcgacttgaagagtcttttttggtggaagaagacaagaagcatgaacgtcatcctatttttggaaatatagtagatgaagttgcttatcatgagaaatatccaactatctatcatctgcgaaaaaaattggtagattctactgataaagcggatttgcgcttaatctatttggccttagcgcatatgattaagtttcgtggtcattttttgattgagggagatttaaatcctgataatagtgatgtggacaaactatttatccagttggtacaaacctacaatcaattatttgaagaaaaccctattaacgcaagtggagtagatgctaaagcgattctttctgcacgattgagtaaatcaagacgattagaaaatctcattgctcagctccccggtgagaagaaaaatggcttatttgggaatctcattgctttgtcattgggtttgacccctaattttaaatcaaattttgatttggcagaagatgctaaattacagctttcaaaagatacttacgatgatgatttagataatttattggcgcaaattggagatcaatatgctgatttgtttttggcagctaagaatttatcagatgctattttactttcagatatcctaagagtaaatactgaaataactaaggctcccctatcagcttcaatgattaaacgctacgatgaacatcatcaagacttgactcttttaaaagctttagttcgacaacaacttccagaaaagtataaagaaatcttttttgatcaatcaaaaaacggatatgcaggttatattgatgggggagctagccaagaagaattttataaatttatcaaaccaattttagaaaaaatggatggtactgaggaattattggtgaaactaaatcgtgaagatttgctgcgcaagcaacggacctttgacaacggctctattccccatcaaattcacttgggtgagctgcatgctattttgagaagacaagaagacttttatccatttttaaaagacaatcgtgagaagattgaaaaaatcttgacttttcgaattccttattatgttggtccattggcgcgtggcaatagtcgttttgcatggatgactcggaagtctgaagaaacaattaccccatggaattttgaagaagttgtcgataaaggtgcttcagctcaatcatttattgaacgcatgacaaactttgataaaaatcttccaaatgaaaaagtactaccaaaacatagtttgctttatgagtattttacggtttataacgaattgacaaaggtcaaatatgttactgaaggaatgcgaaaaccagcatttctttcaggtgaacagaagaaagccattgttgatttactcttcaaaacaaatcgaaaagtaaccgttaagcaattaaaagaagattatttcaaaaaaatagaatgttttgatagtgttgaaatttcaggagttgaagatagatttaatgcttcattaggtacctaccatgatttgctaaaaattattaaagataaagattttttggataatgaagaaaatgaagatatcttagaggatattgttttaacattgaccttatttgaagatagggagatgattgaggaaagacttaaaacatatgctcacctctttgatgataaggtgatgaaacagcttaaacgtcgccgttatactggttggggacgtttgtctcgaaaattgattaatggtattagggataagcaatctggcaaaacaatattagattttttgaaatcagatggttttgccaatcgcaattttatgcagctgatccatgatgatagtttgacatttaaagaagacattcaaaaagcacaagtgtctggacaaggcgatagtttacatgaacatattgcaaatttagctggtagccctgctattaaaaaaggtattttacagactgtaaaagttgttgatgaattggtcaaagtaatggggcggcataagccagaaaatatcgttattgaaatggcacgtgaaaatcagacaactcaaaagggccagaaaaattcgcgagagcgtatgaaacgaatcgaagaaggtatcaaagaattaggaagtcagattcttaaagagcatcctgttgaaaatactcaattgcaaaatgaaaagctctatctctattatctccaaaatggaagagacatgtatgtggaccaagaattagatattaatcgtttaagtgattatgatgtcgatgccattgttccacaaagtttccttaaagacgattcaatagacaataaggtcttaacgcgttctgataaaaatcgtggtaaatcggataacgttccaagtgaagaagtagtcaaaaagatgaaaaactattggagacaacttctaaacgccaagttaatcactcaacgtaagtttgataatttaacgaaagctgaacgtggtggtttgagtgaacttgataaagctggttttatcaaacgccaattggttgaaactcgccaaatcactaagcatgtggcacaaattttggatagtcgcatgaatactaaatacgatgaaaatgataaacttattcgagaggttaaagtgattaccttaaaatctaaattagtttctgacttccgaaaagatttccaattctataaagtacgtgagattaacaattaccatcatgcccatgatgcgtatctaaatgccgtcgttggaactgctttgattaagaaatatccaaaacttgaatcggagtttgtctatggtgattataaagtttatgatgttcgtaaaatgattgctaagtctgagcaagaaataggcaaagcaaccgcaaaatatttcttttactctaatatcatgaacttcttcaaaacagaaattacacttgcaaatggagagattcgcaaacgccctctaatcgaaactaatggggaaactggagaaattgtctgggataaagggcgagattttgccacagtgcgcaaagtattgtccatgccccaagtcaatattgtcaagaaaacagaagtacagacaggcgaattctccaaggagtcaattttaccaaaaagaaattcggacaagcttattgctcgtaaaaaagactgggatccaaaaaaatatggtggttttgatagtccaacggtagcttattcagtcctagtggttgctaaggtggaaaaagggaaatcgaagaagttaaaatccgttaaagagttactagggatcacaattatggaaagaagttcctttgaaaaaaatccgattgactttttagaagctaaaggatataaggaagttaaaaaagacttaatcattaaactacctaaatatagtctttttgagttagaaaacggtcgtaaacggatgctggctagtgccggagaattacaaaaaggaaatgagctggctctgccaagcaaatatgtgaattttttatatttagctagtcattatgaaaagttgaagggtagtccagaagataacgaacaaaaacaattgtttgtggagcagcataagcattatttagatgagattattgagcaaatcagtgaattttctaagcgtgttattttagcagatgccaatttagataaagttcttagtgcatataacaaacatagagacaaaccaatacgtgaacaagcagaaaatattattcatttatttacgttgacgaatcttggagctcccgctgcttttaaatattttgatacaacaattgatcgtaaacgatatacgtctacaaaagaagttttagatgccactcttatccatcaatccatcactggtctttatgaaacacgcattgatttgagtcagctaggaggtgactgattctttgtacccgataattgcctatcttccagtgatggaacagcatttgtgcattggctgcaacaatcagccttacttgtgcctgttctatttccgaaccgaccgcttgtatgaatgcatcaaaattcgttttctctacgttggattccttgttgctcatattgtgatgataatttctacaaatatagtcattggtaactatctatgaaactgtttgatacttttatcagtctaatagttttacaaggtctttcttcatttcttcgtcaatatccctgtatcgtctgaaagctttgcttccctccttgtgtcccgacagtgcggaaacaaggttcgggtctttcacttttttatagatattgccgataaacgtacgtcttgccagatggctgcttgccacttcataaataggtcgtttgatttcgttgtgcgtcaacgggtctaagattgttacgatgcggtcaactccagctaatttgaatatcttttttatggcatcattgtacttttgctcggatatgaacggcaacagttttccctcatattctttgtagcgttcaaggatttctttcgctttgtcgttaagtggaacacgtaccgtaaccggattcccctctttggttttcttgggaatatattctatggcttcattgaccacatttagtttggtcattcggtacaggtcgctcaccctgcatcctatcagtgtctgaaatatgaatatatccctctgtattgccagttgtggggtggcagaaaggtctgcattaaaaatcctgtccctttcttcgagtgttatataataaggtgtaccatatgtacactcctctatcggaaacttgtcgaaaggtctgtttgtggtgcgtttgttatcgaagcaccacaggaagaatgtgcgtattcttgaaaaacagtctatcagcgtgtttttgcttctgggctgtggtgtcctcttttcgggaatggcttcataaatgctcgggtaaagttcataatactggtattcgttctgaaagaaatcccacatatcccgaagcgtgtcaggtgttaccaaatccacatcaaggataaagcccttttgtcctctctttgtagcccttacatatagttcataacgcagtaaggctcttttgacaacccggaaatttttctttcgtacttccgacaaagggtgcttgtttagaaattcatcgaatagttctccaatggtaggcttgataaccacttcctccggcaaaaaatatttttcaggatggtaaaatttatcaagtgttgtttttagccattctttgtctattgcttccttttcttgttgatataccttctcgatataggttttcaactggcgtatctcttcatttatatgggtacgcatttcttcattgcagacagctttcgtttttacacattcgtctttatcatcccatagattgggattgatggctaactgagtaggagcaacggagtctaactgccttccgtttctaaaacggacatagattgtagccatggattctgtatcatatcgtttggctgcttttttaatgataaaggttactttcatagactttcaggttgaattttactctgctgcaaatataaatattttccccagcattttccccacatctgctaaatattttgcaattcgattaaacttggattaaaatttaataggattataacatattgaaatacagtgtaattgtggcgtttttccgcatttttctttttacccacattttccccactttaattatttcaaatgcggggtctgggtacaagaaagaaagctaagtatttgatagttcaatacttagctttttcttttgcttgaattttccccacattttccccacacgtgcaaaaaatatagcagtaagtcattatttcttttggttgaacgtagagagtagcgatattaaaagaatccgatgagaaaagactaatatttatctatccattcagtttgatttttcaggactttacatcgtcctgaaagtatttgttggtaccggtaccgaggacgcgtaaacatttacagttgcatgtggcctattgtttaggacgcgttatctccttaacgtacgttttcgttccattggccctcaaaccccgttatatacattcatgtccatttatgtaaaaaatcctgctgaccttgtttatgtcttgtcagtcaccatttgcaaaaccatatttgaccctcaaagaggctgaatttgataagcaacttgctacatactcataataaggagctaaatagaacacgaatgggaaatactcaaatgccaaactaaagaagatattggccaaaataaacgctataccgagagagaaacttgatttttcaacttcctaaccaacagtgttgttcaaacatttctacttatttgtacttaccagttgaacctacgtttccctaataaaatgtctatggtaaaaagttaaaaaatcctcctacttttgttagatatatttttttgtgtaattttgtaatcgttatgcggcagtaataatatacatattaatacgagttaggaatcctgtagttctcatatgctacgaggaggtattaaaaggtgcgtttcgacaatgcatctattgtagtatattattgcttaatccaaatgaatattataaatttaggaattcttgctcacattgatgcaggaaaaacttccgtaaccgagaatctgctgtttgccagtggagcaacggaaaagtgcggctgtgtggataatggtgacaccataacggactctatggatatagagaaacgtagaggaattactgttcgggcttctacgacatctattatctggaatggtgtgaaatgcaatatcattgacactccgggacacatggattttattgcggaagtggagcggacattcaaaatgcttgatggagcagtcctcatcttatccgcaaaggaaggcatacaagcgcagacaaagttgctgttcaatactttacagaagctgcaaatcccgacaattatatttatcaataagattgaccgagccggtgtgaatttggagcgtttgtatctggatataaaagcaaatctgtctcaagatgtcctgtttatgcaaaatgttgtcgatggatcggtttatccggtttgctcccaaacatatataaaggaagaatacaaagaatttgtatgcaaccatgacgacaatatattagaacgatatttggcggatagcgaaatttcaccggctgattattggaatacgataatcgctcttgtggcaaaagccaaagtctatccggtgctacatggatcagcaatgttcaatatcggtatcaatgagttgttggacgccatcacttcttttatacttcctccggcatcggtctcaaacagactttcatcttatctttataagatagagcatgaccccaaaggacataaaagaagttttctaaaaataattgacggaagtctgagacttcgagacgttgtaagaatcaacgattcggaaaaattcatcaagattaaaaatctaaaaactatcaatcagggcagagagataaatgttgatgaagtgggcgccaatgatatcgcgattgtagaggatatggatgattttcgaatcggaaattatttaggtgctgaaccttgtttgattcaaggattatcgcatcagcatcccgctctcaaatcctccgtccggccagacaggcccgaagagagaagcaaggtgatatccgctctgaatacattgtggattgaagacccgtctttgtccttttccataaactcatatagtgatgaattggaaatctcgttatatggtttaacccaaaaggaaatcatacagacattgctggaagaacgattttccgtaaaggtccattttgatgagatcaagactatatacaaagaacgacctgtaaaaaaggtcaataagattattcagatcgaagtgccgcccaacccttattgggccacaatagggctgactcttgaacccttaccgttagggacagggttgcaaatcgaaagtgacatctcctatggttatctgaaccattcttttcaaaatgccgtttttgaagggattcgtatgtcttgccaatccgggttacatggatgggaagtgactgatctgaaagtaacttttactcaagccgagtattatagcccggtaagtacacctgctgatttcagacagctgaccccttatgtcttcaggctggccttgcaacagtcaggtgtggacattctcgaaccgatgctctattttgagttgcagataccccaagcggcaagttccaaagctattacagatttgcaaaaaatgatgtctgagattgaagacatcagttgcaataatgagtggtgtcatattaaagggaaagttccattaaatacaagtaaagactatgcatcagaagtaagttcatacactaagggcttaggcatttttatggttaagccatgcgggtatcaaataacaaaaggcggttattctgataatatccgcatgaacgaaaaagataaacttttattcatgttccaaaaatcaatgtcatcaaaataatggtataacctctccttaatttattgcatctcttttcgaatatttatgttttttgagaaaagaacgtactcatggttcatcccgatatgcgtatcggtctgtatatcagcaactttctatgtgtttcaactacaatagtcatctattctcatctttctgagtccaccccctgcaaagcccctctttacgacataaaaattcggtcggaaaaggtatgcaaaagatgtttctctctttaagagaaactcttcgggatgcaaaaatatgaaaataactccaattcaccaaattatatagcgacttttttacaaaatgctaaaatttgttgatttccgtcaagcaattgttgagcaaaaatgtcttttacgataaaatgatacctcaatatcaactgtttagcaaaacgatatttctcttaaagagagaaacacctttttgttcaccaatccccgacttttaatcccgcggccatgattgaaaaaggaagagtatgagtattcaacatttccgtgtcgcccttattcccttttttgcggcattttgccttcctgtttttgctcacccagaaacgctggtgaaagtaaaagatgctgaagatcagttgggtgcacgagtgggttacatcgaactggatctcaacagcggtaagatccttgagagttttcgccccgaagaacgttttccaatgatgagcacttttaaagttctgctatgtggcgcggtattatcccgtattgacgccgggcaagagcaactcggtcgccgcatacactattctcagaatgacttggttgagtactcaccagtcacagaaaagcatcttacggatggcatgacagtaagagaattatgcagtgctgccataaccatgagtgataacactgcggccaacttacttctgacaacgatcggaggaccgaaggagctaaccgcttttttgcacaacatgggggatcatgtaactcgccttgatcgttgggaaccggagctgaatgaagccataccaaacgacgagcgtgacaccacgatgcctgtagcaatggcaacaacgttgcgcaaactattaactggcgaactacttactctagcttcccggcaacaattaatagactggatggaggcggataaagttgcaggaccacttctgcgctcggcccttccggctggctggtttattgctgataaatctggagccggtgagcgtgggtcacgcggtatcattgcagcactggggccagatggtaagccctcccgtatcgtagttatctacacgacggggagtcaggcaactatggatgaacgaaatagacagatcgctgagataggtgcctcactgattaagcattggtaactgtcagaccaagtttactcataacgcgtcaattcgagggggatcaattccgtgataggtgggctgcccttcctggttggcttggtttcatcagccatccgcttgccctcatctgttacgccggcggtagccggccagcctcgcagagcaggattcccgttgagcaccgccaggtgcgaataagggacagtgaagaaggaacacccgctcgcgggtgggcctacttcacctatcctgcccggctgacgccgttggatacaccaaggaaagtctacacgaaccctttggcaaaatcctgtatatcgtgcgaaaaaggatggatataccgaaaaaatcgctataatgaccccgaagcagggttatgcagcggaaaacggaattgatccggccacgatgcgtccggcgtagaggatctgaagatcagcagttcaacctgttgatagtacgtactaagctctcatgtttcacgtactaagctctcatgtttaacgtactaagctctcatgtttaacgaactaaaccctcatggctaacgtactaagctctcatggctaacgtactaagctctcatgtttcacgtactaagctctcatgtttgaacaataaaattaatataaatcagcaacttaaatagcctctaaggttttaagttttataagaaaaaaaagaatatataaggcttttaaagcttttaaggtttaacggttgtggacaacaagccagg

SEQ ID NO: 77 - DNA, 13053 bp, synthetic construct
  misc_feature 1..13053: note = Description of sequence: pBH509
  source 1..13053: mol_type = other DNA
gatgtaacgcactgagaagcccttagagcctctcaaagcaattttgagtgacacaggaacacttaacggctgacatgggaattcccctccaccgcggtgtattaatgcggctgcccctgtacaaagaaaattcgacaaactgttatttttctatctatttatttgaattgtgagcggataacaattacctttgtcggcaattgtgagcggataacaattatgagttgacctgatgagtccgtgaggacgaaacgagtaagctcgtcgtcaactcaatgcgtaaagtgttttagagctagaaatagcaagttaaaataaggctagtccgttatcaacttgaaaaagtggcaccgagtcggtgcttttttggccggcatggtcccagcctcctcgctggcgccggctgggcaacatgcttcggcatggcgaatgggacgcactctaatcgttatcggagtgcttttagattactaatcaaattgcttctactaattgcctatcttccagtgatggaacagcatttgaacgcattggctgcaacaatcagccttgatctggaagaagcaatgaaagctgctgttaagtctccgaatcaggtattgttcctgacaggtgtattcccatccggtaaacgcggatactttgcagttgatctgactcaggaataaattataaattaaggtaagaagattgtaggataagctaatgaaatagaaaaaggatgccgtcacacaacttgtcggcattcttttttgttttattagttgaaaatatagtgaaaaagttgcctaaatatgtatgttaacaaattatttgtcgtaactttgcactccaaatctgtttttaacatatggcactagtgaaaccagtaacgttatacgatgtcgcagagtatgccggtgtctcttatcagaccgtttcccgcgtggtgaaccaggccagccacgtttctgcgaaaacgcgggaaaaagtggaagcggcgatggcggagctcaattacattcccaaccgcgtggcacaacaactggcgggcaaagcgtcgcataccattggcatgttgatcactgccagtaccaatcctttctattcagaactggtgcgtggcgttgaacgcagctgcttcgaacgcggttatagtctcgtcctttgcaataccgaaggcgatgaacagcggatgaatcgcaatctggaaacgctgatgcaaaaacgcgttgatggcttgctgttactgtgcaccgaaacgcatcaaccttcgcgtgaaatcatgcaacgttatccgacagtgcctactgtgatgatggactgggctccgttcgatggcgacagcgatcttattcaggataactcgttgctgggcggagacttagcaacgcaatatctgatcgataaaggtcatacccgtatcgcctgtattaccggcccgctggataaaactccggcgcgcctgcggttggaaggttatcgggcggcgatgaaacgtgcgggtctcaacattcctgatggctatgaagtcactggtgattttgaatttaacggcgggtttgacgctatgcgccaactgctatcacatccgctgcgtcctcaggccgtctttaccggaaatgacgctatggctgttggcgtttaccaggcgttatatcaggcagagttacaggttccgcaggatatcgcggtgattggctatgacgatatcgaactggcaagctttatgacgccaccattaaccactatccaccaaccgaaagatgaactgggggagctggcgattgatgtactcatccatcggataacccagccgacccttcagcaacaacgattacaacttactccgattctgatggaacgcggttcggcttagctggtgaaaagaaaaaccaccctggcgcccaatacgcaaaccgcctctccccgcgcgttggccgattcattaatgcagctggcacgacaggtttcccgactggaaagcgggcagtgagctttcctcggtaccaaattccagaaaagaggcctcccgaaaggggggccttttttcgttttggtcctacttgtgcctgttctatttcctatgcggttcctggccttttgctggccttttgctcacatgttctttcctgcgttatcccctgattctgtggataaccgtattaccgcctttgagtgagctgatacatcccaaatgctgctcggtaccaaagacgaacaataagacgctgaaaagcgtcttttttcgttttggtccgataaagtttggaagataaagctaaaagttcttatctttgcagtccgaaataaagacatataaaagaaaagacaccatggataagaaatactcaataggcttagctatcggcacaaatagcgtcggatgggcggtgatcactgatgaatataaggttccgtctaaaaagttcaaggttctgggaaatacagaccgccacagtatcaaaaaaaatcttataggggctcttttatttgacagtggagagacagcggaagcgactcgtctcaaacggacagctcgtagaaggtatacacgtcggaagaatcgtatttgttatctacaggagattttttcaaatgagatggcgaaagtagatgatagtttctttcatcgacttgaagagtcttttttggtggaagaagacaagaagcatgaacgtcatcctatttttggaaatatagtagatgaagttgcttatcatgagaaatatccaactatctatcatctgcgaaaaaaattggtagattctactgataaagcggatttgcgcttaatctatttggccttagcgcatatgattaagtttcgtggtcattttttgattgagggagatttaaatcctgataatagtgatgtggacaaactatttatccagttggtacaaacctacaatcaattatttgaagaaaaccctattaacgcaagtggagtagatgctaaagcgattctttctgcacgattgagtaaatcaagacgattagaaaatctcattgctcagctccccggtgagaagaaaaatggcttatttgggaatctcattgctttgtcattgggtttgacccctaattttaaatcaaattttgatttggcagaagatgctaaattacagctttcaaaagatacttacgatgatgatttagataatttattggcgcaaattggagatcaatatgctgatttgtttttggcagctaagaatttatcagatgctattttactttcagatatcctaagagtaaatactgaaataactaaggctcccctatcagcttcaatgattaaacgctacgatgaacatcatcaagacttgactcttttaaaagctttagttcgacaacaacttccagaaaagtataaagaaatcttttttgatcaatcaaaaaacggatatgcaggttatattgatgggggagctagccaagaagaattttataaatttatcaaaccaattttagaaaaaatggatggtactgaggaattattggtgaaactaaatcgtgaagatttgctgcgcaagcaacggacctttgacaacggctctattccccatcaaattcacttgggtgagctgcatgctattttgagaagacaagaagacttttatccatttttaaaagacaatcgtgagaagattgaaaaaatcttgacttttcgaattccttattatgttggtccattggcgcgtggcaatagtcgttttgcatggatgactcggaagtctgaagaaacaattaccccatggaattttgaagaagttgtcgataaaggtgcttcagctcaatcatttattgaacgcatgacaaactttgataaaaatcttccaaatgaaaaagtactaccaaaacatagtttgctttatgagtattttacggtttataacgaattgacaaaggtcaaatatgttactgaaggaatgcgaaaaccagcatttctttcaggtgaacagaagaaagccattgttgatttactcttcaaaacaaatcgaaaagtaaccgttaagcaattaaaagaagattatttcaaaaaaatagaatgttttgatagtgttgaaatttcaggagttgaagatagatttaatgcttcattaggtacctaccatgatttgctaaaaattattaaagataaagattttttggataatgaagaaaatgaagatatcttagaggatattgttttaacattgaccttatttgaagatagggagatgattgaggaaagacttaaaacatatgctcacctctttgatgataaggtgatgaaacagcttaaacgtcgccgttatactggttggggacgtttgtctcgaaaattgattaatggtattagggataagcaatctggcaaaacaatattagattttttgaaatcagatggttttgccaatcgcaattttatgcagctgatccatgatgatagtttgacatttaaagaagacattcaaaaagcacaagtgtctggacaaggcgatagtttacatgaacatattgcaaatttagctggtagccctgctattaaaaaaggtattttacagactgtaaaagttgttgatgaattggtcaaagtaatggggcggcataagccagaaaatatcgttattgaaatggcacgtgaaaatcagacaactcaaaagggccagaaaaattcgcgagagcgtatgaaacgaatcgaagaaggtatcaaagaattaggaagtcagattcttaaagagcatcctgttgaaaatactcaattgcaaaatgaaaagctctatctctattatctccaaaatggaagagacatgtatgtggaccaagaattagatattaatcgtttaagtgattatgatgtcgatgccattgttccacaaagtttccttaaagacgattcaatagacaataaggtcttaacgcgttctgataaaaatcgtggtaaatcggataacgttccaagtgaagaagtagtcaaaaagatgaaaaactattggagacaacttctaaacgccaagttaatcactcaacgtaagtttgataatttaacgaaagctgaacgtggtggtttgagtgaacttgataaagctggttttatcaaacgccaattggttgaaactcgccaaatcactaagcatgtggcacaaattttggatagtcgcatgaatactaaatacgatgaaaatgataaacttattcgagaggttaaagtgattaccttaaaatctaaattagtttctgacttccgaaaagatttccaattctataaagtacgtgagattaacaattaccatcatgcccatgatgcgtatctaaatgccgtcgttggaactgctttgattaagaaatatccaaaacttgaatcggagtttgtctatggtgattataaagtttatgatgttcgtaaaatgattgctaagtctgagcaagaaataggcaaagcaaccgcaaaatatttcttttactctaatatcatgaacttcttcaaaacagaaattacacttgcaaatggagagattcgcaaacgccctctaatcgaaactaatggggaaactggagaaattgtctgggataaagggcgagattttgccacagtgcgcaaagtattgtccatgccccaagtcaatattgtcaagaaaacagaagtacagacaggcgaattctccaaggagtcaattttaccaaaaagaaattcggacaagcttattgctcgtaaaaaagactgggatccaaaaaaatatggtggttttgatagtccaacggtagcttattcagtcctagtggttgctaaggtggaaaaagggaaatcgaagaagttaaaatccgttaaagagttactagggatcacaattatggaaagaagttcctttgaaaaaaatccgattgactttttagaagctaaaggatataaggaagttaaaaaagacttaatcattaaactacctaaatatagtctttttgagttagaaaacggtcgtaaacggatgctggctagtgccggagaattacaaaaaggaaatgagctggctctgccaagcaaatatgtgaattttttatatttagctagtcattatgaaaagttgaagggtagtccagaagataacgaacaaaaacaattgtttgtggagcagcataagcattatttagatgagattattgagcaaatcagtgaattttctaagcgtgttattttagcagatgccaatttagataaagttcttagtgcatataacaaacatagagacaaaccaatacgtgaacaagcagaaaatattattcatttatttacgttgacgaatcttggagctcccgctgcttttaaatattttgatacaacaattgatcgtaaacgatatacgtctacaaaagaagttttagatgccactcttatccatcaatccatcactggtctttatgaaacacgcattgatttgagtcagctaggaggtgactgattctttgtacccgataattgcctatcttccagtgatggaacagcatttgtgcattggctgcaacaatcagccttacttgtgcctgttctatttccgaaccgaccgcttgtatgaatgcatcaaaattcgttttctctacgttggattccttgttgctcatattgtgatgataatttctacaaatatagtcattggtaactatctatgaaactgtttgatacttttatcagtctaatagttttacaaggtctttcttcatttcttcgtcaatatccctgtatcgtctgaaagctttgcttccctccttgtgtcccgacagtgcggaaacaaggttcgggtctttcacttttttatagatattgccgataaacgtacgtcttgccagatggctgcttgccacttcataaataggtcgtttgatttcgttgtgcgtcaacgggtctaagattgttacgatgcggtcaactccagctaatttgaatatcttttttatggcatcattgtacttttgctcggatatgaacggcaacagttttccctcatattctttgtagcgttcaaggatttctttcgctttgtcgttaagtggaacacgtaccgtaaccggattcccctctttggttttcttgggaatatattctatggcttcattgaccacatttagtttggtcattcggtacaggtcgctcaccctgcatcctatcagtgtctgaaatatgaatatatccctctgtattgccagttgtggggtggcagaaaggtctgcattaaaaatcctgtccctttcttcgagtgttatataataaggtgtaccatatgtacactcctctatcggaaacttgtcgaaaggtctgtttgtggtgcgtttgttatcgaagcaccacaggaagaatgtgcgtattcttgaaaaacagtctatcagcgtgtttttgcttctgggctgtggtgtcctcttttcgggaatggcttcataaatgctcgggtaaagttcataatactggtattcgttctgaaagaaatcccacatatcccgaagcgtgtcaggtgttaccaaatccacatcaaggataaagcccttttgtcctctctttgtagcccttacatatagttcataacgcagtaaggctcttttgacaacccggaaatttttctttcgtacttccgacaaagggtgcttgtttagaaattcatcgaatagttctccaatggtaggcttgataaccacttcctccggcaaaaaatatttttcaggatggtaaaatttatcaagtgttgtttttagccattctttgtctattgcttccttttcttgttgatataccttctcgatataggttttcaactggcgtatctcttcatttatatgggtacgcatttcttcattgcagacagctttcgtttttacacattcgtctttatcatcccatagattgggattgatggctaactgagtaggagcaacggagtctaactgccttccgtttctaaaacggacatagattgtagccatggattctgtatcatatcgtttggctgcttttttaatgataaaggttactttcatagactttcaggttgaattttactctgctgcaaatataaatattttccccagcattttccccacatctgctaaatattttgcaattcgattaaacttggattaaaatttaataggattataacatattgaaatacagtgtaattgtggcgtttttccgcatttttctttttacccacattttccccactttaattatttcaaatgcggggtctgggtacaagaaagaaagctaagtatttgatagttcaatacttagctttttcttttgcttgaattttccccacattttccccacacgtgcaaaaaatatagcagtaagtcattatttcttttggttgaacgtagagagtagcgatattaaaagaatccgatgagaaaagactaatatttatctatccattcagtttgatttttcaggactttacatcgtcctgaaagtatttgttggtaccggtaccgaggacgcgtaaacatttacagttgcatgtggcctattgtttaggacgcgttatctccttaacgtacgttttcgttccattggccctcaaaccccgttatatacattcatgtccatttatgtaaaaaatcctgctgaccttgtttatgtcttgtcagtcaccatttgcaaaaccatatttgaccctcaaagaggctgaatttgataagcaacttgctacatactcataataaggagctaaatagaacacgaatgggaaatactcaaatgccaaactaaagaagatattggccaaaataaacgctataccgagagagaaacttgatttttcaacttcctaaccaacagtgttgttcaaacatttctacttatttgtacttaccagttgaacctacgtttccctaataaaatgtctatggtaaaaagttaaaaaatcctcctacttttgttagatatatttttttgtgtaattttgtaatcgttatgcggcagtaataatatacatattaatacgagttaggaatcctgtagttctcatatgctacgaggaggtattaaaaggtgcgtttcgacaatgcatctattgtagtatattattgcttaatccaaatgaatattataaatttaggaattcttgctcacattgatgcaggaaaaacttccgtaaccgagaatctgctgtttgccagtggagcaacggaaaagtgcggctgtgtggataatggtgacaccataacggactctatggatatagagaaacgtagaggaattactgttcgggcttctacgacatctattatctggaatggtgtgaaatgcaatatcattgacactccgggacacatggattttattgcggaagtggagcggacattcaaaatgcttgatggagcagtcctcatcttatccgcaaaggaaggcatacaagcgcagacaaagttgctgttcaatactttacagaagctgcaaatcccgacaattatatttatcaataagattgaccgagccggtgtgaatttggagcgtttgtatctggatataaaagcaaatctgtctcaagatgtcctgtttatgcaaaatgttgtcgatggatcggtttatccggtttgctcccaaacatatataaaggaagaatacaaagaatttgtatgcaaccatgacgacaatatattagaacgatatttggcggatagcgaaatttcaccggctgattattggaatacgataatcgctcttgtggcaaaagccaaagtctatccggtgctacatggatcagcaatgttcaatatcggtatcaatgagttgttggacgccatcacttcttttatacttcctccggcatcggtctcaaacagactttcatcttatctttataagatagagcatgaccccaaaggacataaaagaagttttctaaaaataattgacggaagtctgagacttcgagacgttgtaagaatcaacgattcggaaaaattcatcaagattaaaaatctaaaaactatcaatcagggcagagagataaatgttgatgaagtgggcgccaatgatatcgcgattgtagaggatatggatgattttcgaatcggaaattatttaggtgctgaaccttgtttgattcaaggattatcgcatcagcatcccgctctcaaatcctccgtccggccagacaggcccgaagagagaagcaaggtgatatccgctctgaatacattgtggattgaagacccgtctttgtccttttccataaactcatatagtgatgaattggaaatctcgttatatggtttaacccaaaaggaaatcatacagacattgctggaagaacgattttccgtaaaggtccattttgatgagatcaagactatatacaaagaacgacctgtaaaaaaggtcaataagattattcagatcgaagtgccgcccaacccttattgggccacaatagggctgactcttgaacccttaccgttagggacagggttgcaaatcgaaagtgacatctcctatggttatctgaaccattcttttcaaaatgccgtttttgaagggattcgtatgtcttgccaatccgggttacatggatgggaagtgactgatctgaaagtaacttttactcaagccgagtattatagcccggtaagtacacctgctgatttcagacagctgaccccttatgtcttcaggctggccttgcaacagtcaggtgtggacattctcgaaccgatgctctattttgagttgcagataccccaagcggcaagttccaaagctattacagatttgcaaaaaatgatgtctgagattgaagacatcagttgcaataatgagtggtgtcatattaaagggaaagttccattaaatacaagtaaagactatgcatcagaagtaagttcatacactaagggcttaggcatttttatggttaagccatgcgggtatcaaataacaaaaggcggttattctgataatatccgcatgaacgaaaaagataaacttttattcatgttccaaaaatcaatgtcatcaaaataatggtataacctctccttaatttattgcatctcttttcgaatatttatgttttttgagaaaagaacgtactcatggttcatcccgatatgcgtatcggtctgtatatcagcaactttctatgtgtttcaactacaatagtcatctattctcatctttctgagtccaccccctgcaaagcccctctttacgacataaaaattcggtcggaaaaggtatgcaaaagatgtttctctctttaagagaaactcttcgggatgcaaaaatatgaaaataactccaattcaccaaattatatagcgacttttttacaaaatgctaaaatttgttgatttccgtcaagcaattgttgagcaaaaatgtcttttacgataaaatgatacctcaatatcaactgtttagcaaaacgatatttctcttaaagagagaaacacctttttgttcaccaatccccgacttttaatcccgcggccatgattgaaaaaggaagagtatgagtattcaacatttccgtgtcgcccttattcccttttttgcggcattttgccttcctgtttttgctcacccagaaacgctggtgaaagtaaaagatgctgaagatcagttgggtgcacgagtgggttacatcgaactggatctcaacagcggtaagatccttgagagttttcgccccgaagaacgttttccaatgatgagcacttttaaagttctgctatgtggcgcggtattatcccgtattgacgccgggcaagagcaactcggtcgccgcatacactattctcagaatgacttggttgagtactcaccagtcacagaaaagcatcttacggatggcatgacagtaagagaattatgcagtgctgccataaccatgagtgataacactgcggccaacttacttctgacaacgatcggaggaccgaaggagctaaccgcttttttgcacaacatgggggatcatgtaactcgccttgatcgttgggaaccggagctgaatgaagccataccaaacgacgagcgtgacaccacgatgcctgtagcaatggcaacaacgttgcgcaaactattaactggcgaactacttactctagcttcccggcaacaattaatagactggatggaggcggataaagttgcaggaccacttctgcgctcggcccttccggctggctggtttattgctgataaatctggagccggtgagcgtgggtcacgcggtatcattgcagcactggggccagatggtaagccctcccgtatcgtagttatctacacgacggggagtcaggcaactatggatgaacgaaatagacagatcgctgagataggtgcctcactgattaagcattggtaactgtcagaccaagtttactcataacgcgtcaattcgagggggatcaattccgtgataggtgggctgcccttcctggttggcttggtttcatcagccatccgcttgccctcatctgttacgccggcggtagccggccagcctcgcagagcaggattcccgttgagcaccgccaggtgcgaataagggacagtgaagaaggaacacccgctcgcgggtgggcctacttcacctatcctgcccggctgacgccgttggatacaccaaggaaagtctacacgaaccctttggcaaaatcctgtatatcgtgcgaaaaaggatggatataccgaaaaaatcgctataatgaccccgaagcagggttatgcagcggaaaacggaattgatccggccacgatgcgtccggcgtagaggatctgaagatcagcagttcaacctgttgatagtacgtactaagctctcatgtttcacgtactaagctctcatgtttaacgtactaagctctcatgtttaacgaactaaaccctcatggctaacgtactaagctctcatggctaacgtactaagctctcatgtttcacgtactaagctctcatgtttgaacaataaaattaatataaatcagcaacttaaatagcctctaaggttttaagttttataagaaaaaaaagaatatataaggcttttaaagcttttaaggtttaacggttgtggacaacaagccagg

SEQ ID NO: 78 - DNA, 12405 bp, synthetic construct
  misc_feature 1..12405: note = Description of sequence: pBH510
  source 1..12405: mol_type = other DNA
gtttaacggttgtggacaacaagccagggatgtaacgcactgagaagcccttagagcctctcaaagcaattttgagtgacacaggaacacttaacggctgacatgggaattcccctccaccgcggtggccctgtacaaagaaaattcgacaaactgttatttttctatctatttatttgaattgtgagcggataacaattacctttgtcggcaattgtgagcggataacaattatgatgttgtctgatgagtccgtgaggacgaaacgagtaagctcgtcacaacattggcaccgataacgttttagagctagaaatagcaagttaaaataaggctagtccgttatcaacttgaaaaagtggcaccgagtcggtgcttttttggccggcatggtcccagcctcctcgctggcgccggctgggcaacatgcttcggcatggcgaatgggacgcactctaatcgttatcggagtgcttttagattactaatcaaattgcttctactaattgcctatcttccagtgatggaacagcatttgaacgcattggctgcaacaatcagccttgatctggaagaagcaatgaaagctgctgttaagtctccgaatcaggtattgttcctgacaggtgtattcccatccggtaaacgcggatactttgcagttgatctgactcaggaataaattataaattaaggtaagaagattgtaggataagctaatgaaatagaaaaaggatgccgtcacacaacttgtcggcattcttttttgttttattagttgaaaatatagtgaaaaagttgcctaaatatgtatgttaacaaattatttgtcgtaactttgcactccaaatctgtttttaacatatggcactagtgaaaccagtaacgttatacgatgtcgcagagtatgccggtgtctcttatcagaccgtttcccgcgtggtgaaccaggccagccacgtttctgcgaaaacgcgggaaaaagtggaagcggcgatggcggagctgaattacattcccaaccgcgtggcacaacaactggcgggcaaacagtcgttgctgattggcgttgccacctccagtctggccctgcacgcgccgtcgcaaattgtcgcggcgattaaatctcgcgccgatcaactgggtgccagcgtggtggtgtcgatggtagaacgaagcggcgtcgaagcctgtaaaacggcggtgcacaatcttctcgcgcaacgcgtcagtgggctgatcattaactatccgctggatgaccaggatgccattgctgtggaagctgcctgcactaatgttccggcgttatttcttgatgtctctgaccagacacccatcaacagtattattttctcccatgaagacggtacgcgactgggcgtggagcatctggtcgcattgggtcaccagcaaatcgcgctgttagcgggcccattaagttctgtctcggcgcgtctgcgtctggctggctggcataaatatctcactcgcaatcaaattcagccgatagcggaacgggaaggcgactggagtgccatgtccggttttcaacaaaccatgcaaatgctgaatgagggcatcgttcccactgcgatgctggttgccaacgatcagatggcgctgggcgcaatgcgcgccattaccgagtccgggctgcgcgttggtgcggatatctcggtagtgggatacgacgataccgaagacagctcatgttatatcccgccgttaaccaccatcaaacaggattttcgcctgctggggcaaaccagcgtggaccgcttgctgcaactctctcagggccaggcggtgaagggcaatcagctgttgcccgtctcactggtgaaaagaaaaaccaccctggcgcccaatacgcaaaccgcctctccccgcgcgttggccgattcattaatgcagctggcacgacaggtttcccgactggaaagcgggcagtgagtgcaacaatcagccttgatctggaagaagcaatgaaagctgctgttaagtctccgaatcaggtattgttcctgacaggtgtattcccatccggtaaacgcggatactttgcagttgatctgactcaggaataaattataaattaaggtaagaagattgtaggataagctaatgaaatagaaaaaggatgccgtcacacaacttgtcggcattcttttttgttttattagttgaaaatatagtgaaaaagttgcctaaatatgtatgttaacaaattatttgtcgtaactttgcactccaaatctgtttttaacatatggcactagtgaaaccagtaacgttatacgatgtcgcagagtatgccggtgtctcttatcagaccgtttcccgcgtggtgaaccaggccagccacgtttctgcgaaaacgcgggaaaaagtggaagcggcgatggcggagctcaattacattcccaaccgcgtggcacaacaactggcgggcaaagcgtcgcataccattggcatgttgatcactgccagtaccaatcctttctattcagaactggtgcgtggcgttgaacgcagctgcttcgaacgcggttatagtctcgtcctttgcaataccgaaggcgatgaacagcggatgaatcgcaatctggaaacgctgatgcaaaaacgcgttgatggcttgctgttactgtgcaccgaaacgcatcaaccttcgcgtgaaatcatgcaacgttatccgacagtgcctactgtgatgatggactgggctccgttcgatggcgacagcgatcttattcaggataactcgttgctgggcggagacttagcaacgcaatatctgatcgataaaggtcatacccgtatcgcctgtattaccggcccgctggataaaactccggcgcgcctgcggttggaaggttatcgggcggcgatgaaacgtgcgggtctcaacattcctgatggctatgaagtcactggtgattttgaatttaacggcgggtttgacgctatgcgccaactgctatcacatccgctgcgtcctcaggccgtctttaccggaaatgacgctatggctgttggcgtttaccaggcgttatatcaggcagagttacaggttccgcaggatatcgcggtgattggctatgacgatatcgaactggcaagctttatgacgccaccattaaccactatccaccaaccgaaagatgaactgggggagctggcgattgatgtactcatccatcggataacccagccgacccttcagcaacaacgattacaacttactccgattctgatggaacgcggttcggcttagctggtgaaaagaaaaaccaccctggcgcccaatacgcaaaccgcctctccccgcgcgttggccgattcattaatgcagctggcacgacaggtttcccgactggaaagcgggcagtgagctttcctcggtaccaaattccagaaaagaggcctcccgaaaggggggccttttttcgttttggtcctacttgtgcctgttctatttccatcccaaatgctgctcggtaccaaagacgaacaataagacgctgaaaagcgtcttttttcgttttggtccgataaagtttggaagataaagctaaaagttcttatctttgcagtccgaaataaagacatataaaagaaaagacaccatggataagaaatactcaataggcttagctatcggcacaaatagcgtcggatgggcggtgatcactgatgaatataaggttccgtctaaaaagttcaaggttctgggaaatacagaccgccacagtatcaaaaaaaatcttataggggctcttttatttgacagtggagagacagcggaagcgactcgtctcaaacggacagctcgtagaaggtatacacgtcggaagaatcgtatttgttatctacaggagattttttcaaatgagatggcgaaagtagatgatagtttctttcatcgacttgaagagtcttttttggtggaagaagacaagaagcatgaacgtcatcctatttttggaaatatagtagatgaagttgcttatcatgagaaatatccaactatctatcatctgcgaaaaaaattggtagattctactgataaagcggatttgcgcttaatctatttggccttagcgcatatgattaagtttcgtggtcattttttgattgagggagatttaaatcctgataatagtgatgtggacaaactatttatccagttggtacaaacctacaatcaattatttgaagaaaaccctattaacgcaagtggagtagatgctaaagcgattctttctgcacgattgagtaaatcaagacgattagaaaatctcattgctcagctccccggtgagaagaaaaatggcttatttgggaatctcattgctttgtcattgggtttgacccctaattttaaatcaaattttgatttggcagaagatgctaaattacagctttcaaaagatacttacgatgatgatttagataatttattggcgcaaattggagatcaatatgctgatttgtttttggcagctaagaatttatcagatgctattttactttcagatatcctaagagtaaatactgaaataactaaggctcccctatcagcttcaatgattaaacgctacgatgaacatcatcaagacttgactcttttaaaagctttagttcgacaacaacttccagaaaagtataaagaaatcttttttgatcaatcaaaaaacggatatgcaggttatattgatgggggagctagccaagaagaattttataaatttatcaaaccaattttagaaaaaatggatggtactgaggaattattggtgaaactaaatcgtgaagatttgctgcgcaagcaacggacctttgacaacggctctattccccatcaaattcacttgggtgagctgcatgctattttgagaagacaagaagacttttatccatttttaaaagacaatcgtgagaagattgaaaaaatcttgacttttcgaattccttattatgttggtccattggcgcgtggcaatagtcgttttgcatggatgactcggaagtctgaagaaacaattaccccatggaattttgaagaagttgtcgataaaggtgcttcagctcaatcatttattgaacgcatgacaaactttgataaaaatcttccaaatgaaaaagtactaccaaaacatagtttgctttatgagtattttacggtttataacgaattgacaaaggtcaaatatgttactgaaggaatgcgaaaaccagcatttctttcaggtgaacagaagaaagccattgttgatttactcttcaaaacaaatcgaaaagtaaccgttaagcaattaaaagaagattatttcaaaaaaatagaatgttttgatagtgttgaaatttcaggagttgaagatagatttaatgcttcattaggtacctaccatgatttgctaaaaattattaaagataaagattttttggataatgaagaaaatgaagatatcttagaggatattgttttaacattgaccttatttgaagatagggagatgattgaggaaagacttaaaacatatgctcacctctttgatgataaggtgatgaaacagcttaaacgtcgccgttatactggttggggacgtttgtctcgaaaattgattaatggtattagggataagcaatctggcaaaacaatattagattttttgaaatcagatggttttgccaatcgcaattttatgcagctgatccatgatgatagtttgacatttaaagaagacattcaaaaagcacaagtgtctggacaaggcgatagtttacatgaacatattgcaaatttagctggtagccctgctattaaaaaaggtattttacagactgtaaaagttgttgatgaattggtcaaagtaatggggcggcataagccagaaaatatcgttattgaaatggcacgtgaaaatcagacaactcaaaagggccagaaaaattcgcgagagcgtatgaaacgaatcgaagaaggtatcaaagaattaggaagtcagattcttaaagagcatcctgttgaaaatactcaattgcaaaatgaaaagctctatctctattatctccaaaatggaagagacatgtatgtggaccaagaattagatattaatcgtttaagtgattatgatgtcgatgccattgttccacaaagtttccttaaagacgattcaatagacaataaggtcttaacgcgttctgataaaaatcgtggtaaatcggataacgttccaagtgaagaagtagtcaaaaagatgaaaaactattggagacaacttctaaacgccaagttaatcactcaacgtaagtttgataatttaacgaaagctgaacgtggtggtttgagtgaacttgataaagctggttttatcaaacgccaattggttgaaactcgccaaatcactaagcatgtggcacaaattttggatagtcgcatgaatactaaatacgatgaaaatgataaacttattcgagaggttaaagtgattaccttaaaatctaaattagtttctgacttccgaaaagatttccaattctataaagtacgtgagattaacaattaccatcatgcccatgatgcgtatctaaatgccgtcgttggaactgctttgattaagaaatatccaaaacttgaatcggagtttgtctatggtgattataaagtttatgatgttcgtaaaatgattgctaagtctgagcaagaaataggcaaagcaaccgcaaaatatttcttttactctaatatcatgaacttcttcaaaacagaaattacacttgcaaatggagagattcgcaaacgccctctaatcgaaactaatggggaaactggagaaattgtctgggataaagggcgagattttgccacagtgcgcaaagtattgtccatgccccaagtcaatattgtcaagaaaacagaagtacagacaggcgaattctccaaggagtcaattttaccaaaaagaaattcggacaagcttattgctcgtaaaaaagactgggatccaaaaaaatatggtggttttgatagtccaacggtagcttattcagtcctagtggttgctaaggtggaaaaagggaaatcgaagaagttaaaatccgttaaagagttactagggatcacaattatggaaagaagttcctttgaaaaaaatccgattgactttttagaagctaaaggatataaggaagttaaaaaagacttaatcattaaactacctaaatatagtctttttgagttagaaaacggtcgtaaacggatgctggctagtgccggagaattacaaaaaggaaatgagctggctctgccaagcaaatatgtgaattttttatatttagctagtcattatgaaaagttgaagggtagtccagaagataacgaacaaaaacaattgtttgtggagcagcataagcattatttagatgagattattgagcaaatcagtgaattttctaagcgtgttattttagcagatgccaatttagataaagttcttagtgcatataacaaacatagagacaaaccaatacgtgaacaagcagaaaatattattcatttatttacgttgacgaatcttggagctcccgctgcttttaaatattttgatacaacaattgatcgtaaacgatatacgtctacaaaagaagttttagatgccactcttatccatcaatccatcactggtctttatgaaacacgcattgatttgagtcagctaggaggtgactgattctttgtacccgatacttgtgcctgttctatttccgaaccgaccgcttgtatgaatccatcaaaattcgttttctctatgttggattccttgttgctcatattgtgatgataatttctacaaatatagtcattggtaactatctatgaaactgtttgatacttttatagttgattaaacttgttcatggcatttgccttaatatcatccgctatgtcaatgtagggtttcatagctttgtagtcgctgtgtcccgtccatttcatgaccacctgtgccgggattccgagagccagcgcattgcagatgaatgtccttcttcctgcatgggtactgagcaaagcgtatttgggtgtgacttcatcaatacgttcatttcccttgtagtaggtttcccgtacaggctcgttgatttctgccagttcgcccagctctttcaggtaatcgttcatcttctggttgctgatgacgggcagagccatgtaattctcgaaatggatgtccttgtatttgtccagtatggctttgctgtatttgttcagttcaatcgtcaggctgtcggcagtcttgactgtggttatttcgatgtggtcggacttcacatcgcttcttttcagattgcgaacatccgaataccgcaaactcgtaaagcagcagaacaggaaaacatcacgcacacgttccaggtattgcttatccttgggtatctggtagtctttcagcttgttcagttcatcccaagtcaggaagattacttttttcgaggtggttttcagtttcggtttgaacgtatcgtatgcaatgttctgatgatgtcctttcctgaagctccagcgcaggaaccatttgaggaatcccatttgcttgccgatggtgctgtttctcatatccttggtgtcacgcaggaagttgacgtattcgttcaatccaaactcgttgaaatagttgaacgttgcatcctccttgaactctttgaggtggttcctcactgctgcaaatttttcataggtggatgccgtccagttattctggttaccgcactcttttacaaactcatcgaacacctcccaaaagctgacaggggcttcttccggctgttcttcactggtgtctttcattctcatgttgaaagcttccttcaactgttgggtcgttggcatgacctcctgcacctcaaattccttgaaaatattctggatttcggcatagtatttcagcaagtccgtattgatttcggctgcactttgctttagcttgttggtacatccgttctttacccgctgcttatctacatcccatttggctacgtcaatccggtagcccgttgtaaactcgatacgttggctggcaaagatgacacgcatacggatgggtacgttctctacgattggcacaccgttctttttccggctctccaatgcaaaaatgatgttgcgcttgatattcataattgggtgcgtttgaaattctacacccaaatatacacccaattattgagatagcaaaagacatttagaaacatttacttttactctatattgtaatttacacttgattatcagtcgtttgcagttttatgatattctgtgaaagtataagttcgagagcctgtctctccgcaaaaaacgctgaaaatcagcagattgcaaaacaaacaccctgttttacacccaagaatgtaaagtcggctgtttttgttttatttaagataatacaaccactacataataaaagagtagcgatattaaaagaatccgatgagaaaagactaatatttatctatccattcagtttgatttttcaggactttacatcgtcctgaaagtatttgttggtaccggtaccgaggacgcgtaaacatttacagttgcatgtggcctattgtttttagccgttaaatattttataactattaaatagcgatacaaattgttcgaaactaatattgtttatatcatatattctcgcatgttttaaagctttattaaattgattttttgtaaacagtttttcgtactctttgttaacccatttcattacaaaagtttcatatttttttctctctttaaatgccatttttgctggctttctttttaatacaattaatgtgctatccactttaggttttggatggaaataatacctaggaatttttgctaatatagaaatatctacctctgccattaacagcaatgctagtgatctgtttgtatctaataacattttagcaaaaccatattccactattaaataacttattgtggctgaactttcaaaaacaatttttcgaattatatttgtgcttatgttgtaaggtatgctgccaaatattttatatggattgtggctaggaaatgtaaatttcagtatatcatcatttactatttgatagttaggataatttaagagcttattacgagttacctcacataatttagaatcaatttctatcgccgttacaaaattacatctctttaccaatccagcagtaaaatgacctttccctgcacctatttcaaagatgttatctttttcatctaaacttatgcaattcattattttttctatgtgatattttgaagtaataaaattttgactatcttttatatttactttgttcattataacctctccttaatttattgcatctcttttcgaatatttatgttttttgagaaaagaacgtactcatggttcatcccgatatgcgtatcggtctgtatatcagcaactttctatgtgtttcaactacaatagtcatctattctcatctttctgagtccaccccctgcaaagcccctctttacgacataaaaattcggtcggaaaaggtatgcaaaagatgtttctctctttaagagaaactcttcgggatgcaaaaatatgaaaataactccaattcaccaaattatatagcgacttttttacaaaatgctaaaatttgttgatttccgtcaagcaattgttgagcaaaaatgtcttttacgataaaatgatacctcaatatcaactgtttagcaaaacgatatttctcttaaagagagaaacacctttttgttcaccaatccccgacttttaatcccgcggccatgattgaaaaaggaagagtatgagtattcaacatttccgtgtcgcccttattcccttttttgcggcattttgccttcctgtttttgctcacccagaaacgctggtgaaagtaaaagatgctgaagatcagttgggtgcacgagtgggttacatcgaactggatctcaacagcggtaagatccttgagagttttcgccccgaagaacgttttccaatgatgagcacttttaaagttctgctatgtggcgcggtattatcccgtattgacgccgggcaagagcaactcggtcgccgcatacactattctcagaatgacttggttgagtactcaccagtcacagaaaagcatcttacggatggcatgacagtaagagaattatgcagtgctgccataaccatgagtgataacactgcggccaacttacttctgacaacgatcggaggaccgaaggagctaaccgcttttttgcacaacatgggggatcatgtaactcgccttgatcgttgggaaccggagctgaatgaagccataccaaacgacgagcgtgacaccacgatgcctgtagcaatggcaacaacgttgcgcaaactattaactggcgaactacttactctagcttcccggcaacaattaatagactggatggaggcggataaagttgcaggaccacttctgcgctcggcccttccggctggctggtttattgctgataaatctggagccggtgagcgtgggtctcgcggtatcattgcagcactggggccagatggtaagccctcccgtatcgtagttatctacacgacggggagtcaggcaactatggatgaacgaaatagacagatcgctgagataggtgcctcactgattaagcattggtaactgtcagaccaagtttactcataacgcgtcaattcgagggggatcaattccgtgataggtgggctgcccttcctggttggcttggtttcatcagccatccgcttgccctcatctgttacgccggcggtagccggccagcctcgcagagcaggattcccgttgagcaccgccaggtgcgaataagggacagtgaagaaggaacacccgctcgcgggtgggcctacttcacctatcctgcccggctgacgccgttggatacaccaaggaaagtctacacgaaccctttggcaaaatcctgtatatcgtgcgaaaaaggatggatataccgaaaaaatcgctataatgaccccgaagcagggttatgcagcggaaaacggaattgatccggccacgatgcgtccggcgtagaggatctgaagatcagcagttcaacctgttgatagtacgtactaagctctcatgtttcacgtactaagctctcatgtttaacgtactaagctctcatgtttaacgaactaaaccctcatggctaacgtactaagctctcatggctaacgtactaagctctcatgtttcacgtactaagctctcatgtttgaacaataaaattaatataaatcagcaacttaaatagcctctaaggttttaagttttataagaaaaaaaagaatatataaggcttttaaagcttttaag

SEQ ID NO: 79 - DNA, 12405 bp, synthetic construct
  misc_feature 1..12405: note = Description of sequence: pBH511
  source 1..12405: mol_type = other DNA
gtttaacggttgtggacaacaagccagggatgtaacgcactgagaagcccttagagcctctcaaagcaattttgagtgacacaggaacacttaacggctgacatgggaattcccctccaccgcggtggccctgtacaaagaaaattcgacaaactgttatttttctatctatttatttgaattgtgagcggataacaattacctttgtcggcaattgtgagcggataacaattatgagttgacctgatgagtccgtgaggacgaaacgagtaagctcgtcgtcaactcaatgcgtaaagtgttttagagctagaaatagcaagttaaaataaggctagtccgttatcaacttgaaaaagtggcaccgagtcggtgcttttttggccggcatggtcccagcctcctcgctggcgccggctgggcaacatgcttcggcatggcgaatgggacgcactctaatcgttatcggagtgcttttagattactaatcaaattgcttctactaattgcctatcttccagtgatggaacagcatttgaacgcattggctgcaacaatcagccttgatctggaagaagcaatgaaagctgctgttaagtctccgaatcaggtattgttcctgacaggtgtattcccatccggtaaacgcggatactttgcagttgatctgactcaggaataaattataaattaaggtaagaagattgtaggataagctaatgaaatagaaaaaggatgccgtcacacaacttgtcggcattcttttttgttttattagttgaaaatatagtgaaaaagttgcctaaatatgtatgttaacaaattatttgtcgtaactttgcactccaaatctgtttttaacatatggcactagtgaaaccagtaacgttatacgatgtcgcagagtatgccggtgtctcttatcagaccgtttcccgcgtggtgaaccaggccagccacgtttctgcgaaaacgcgggaaaaagtggaagcggcgatggcggagctgaattacattcccaaccgcgtggcacaacaactggcgggcaaacagtcgttgctgattggcgttgccacctccagtctggccctgcacgcgccgtcgcaaattgtcgcggcgattaaatctcgcgccgatcaactgggtgccagcgtggtggtgtcgatggtagaacgaagcggcgtcgaagcctgtaaaacggcggtgcacaatcttctcgcgcaacgcgtcagtgggctgatcattaactatccgctggatgaccaggatgccattgctgtggaagctgcctgcactaatgttccggcgttatttcttgatgtctctgaccagacacccatcaacagtattattttctcccatgaagacggtacgcgactgggcgtggagcatctggtcgcattgggtcaccagcaaatcgcgctgttagcgggcccattaagttctgtctcggcgcgtctgcgtctggctggctggcataaatatctcactcgcaatcaaattcagccgatagcggaacgggaaggcgactggagtgccatgtccggttttcaacaaaccatgcaaatgctgaatgagggcatcgttcccactgcgatgctggttgccaacgatcagatggcgctgggcgcaatgcgcgccattaccgagtccgggctgcgcgttggtgcggatatctcggtagtgggatacgacgataccgaagacagctcatgttatatcccgccgttaaccaccatcaaacaggattttcgcctgctggggcaaaccagcgtggaccgcttgctgcaactctctcagggccaggcggtgaagggcaatcagctgttgcccgtctcactggtgaaaagaaaaaccaccctggcgcccaatacgcaaaccgcctctccccgcgcgttggccgattcattaatgcagctggcacgacaggtttcccgactggaaagcgggcagtgagtgcaacaatcagccttgatctggaagaagcaatgaaagctgctgttaagtctccgaatcaggtattgttcctgacaggtgtattcccatccggtaaacgcggatactttgcagttgatctgactcaggaataaattataaattaaggtaagaagattgtaggataagctaatgaaatagaaaaaggatgccgtcacacaacttgtcggcattcttttttgttttattagttgaaaatatagtgaaaaagttgcctaaatatgtatgttaacaaattatttgtcgtaactttgcactccaaatctgtttttaacatatggcactagtgaaaccagtaacgttatacgatgtcgcagagtatgccggtgtctcttatcagaccgtttcccgcgtggtgaaccaggccagccacgtttctgcgaaaacgcgggaaaaagtggaagcggcgatggcggagctcaattacattcccaaccgcgtggcacaacaactggcgggcaaagcgtcgcataccattggcatgttgatcactgccagtaccaatcctttctattcagaactggtgcgtggcgttgaacgcagctgcttcgaacgcggttatagtctcgtcctttgcaataccgaaggcgatgaacagcggatgaatcgcaatctggaaacgctgatgcaaaaacgcgttgatggcttgctgttactgtgcaccgaaacgcatcaaccttcgcgtgaaatcatgcaacgttatccgacagtgcctactgtgatgatggactgggctccgttcgatggcgacagcgatcttattcaggataactcgttgctgggcggagacttagcaacgcaatatctgatcgataaaggtcatacccgtatcgcctgtattaccggcccgctggataaaactccggcgcgcctgcggttggaaggttatcgggcggcgatgaaacgtgcgggtctcaacattcctgatggctatgaagtcactggtgattttgaatttaacggcgggtttgacgctatgcgccaactgctatcacatccgctgcgtcctcaggccgtctttaccggaaatgacgctatggctgttggcgtttaccaggcgttatatcaggcagagttacaggttccgcaggatatcgcggtgattggctatgacgatatcgaactggcaagctttatgacgccaccattaaccactatccaccaaccgaaagatgaactgggggagctggcgattgatgtactcatccatcggataacccagccgacccttcagcaacaacgattacaacttactccgattctgatggaacgcggttcggcttagctggtgaaaagaaaaaccaccctggcgcccaatacgcaaaccgcctctccccgcgcgttggccgattcattaatgcagctggcacgacaggtttcccgactggaaagcgggcagtgagctttcctcggtaccaaattccagaaaagaggcctcccgaaaggggggccttttttcgttttggtcctacttgtgcctgttctatttccatcccaaatgctgctcggtaccaaagacgaacaataagacgctgaaaagcgtcttttttcgttttggtccgataaagtttggaagataaagctaaaagttcttatctttgcagtccgaaataaagacatataaaagaaaagacaccatggataagaaatactcaataggcttagctatcggcacaaatagcgtcggatgggcggtgatcactgatgaatataaggttccgtctaaaaagttcaaggttctgggaaatacagaccgccacagtatcaaaaaaaatcttataggggctcttttatttgacagtggagagacagcggaagcgactcgtctcaaacggacagctcgtagaaggtatacacgtcggaagaatcgtatttgttatctacaggagattttttcaaatgagatggcgaaagtagatgatagtttctttcatcgacttgaagagtcttttttggtggaagaagacaagaagcatgaacgtcatcctatttttggaaatatagtagatgaagttgcttatcatgagaaatatccaactatctatcatctgcgaaaaaaattggtagattctactgataaagcggatttgcgcttaatctatttggccttagcgcatatgattaagtttcgtggtcattttttgattgagggagatttaaatcctgataatagtgatgtggacaaactatttatccagttggtacaaacctacaatcaattatttgaagaaaaccctattaacgcaagtggagtagatgctaaagcgattctttctgcacgattgagtaaatcaagacgattagaaaatctcattgctcagctccccggtgagaagaaaaatggcttatttgggaatctcattgctttgtcattgggtttgacccctaattttaaatcaaattttgatttggcagaagatgctaaattacagctttcaaaagatacttacgatgatgatttagataatttattggcgcaaattggagatcaatatgctgatttgtttttggcagctaagaatttatcagatgctattttactttcagatatcctaagagtaaatactgaaataactaaggctcccctatcagcttcaatgattaaacgctacgatgaacatcatcaagacttgactcttttaaaagctttagttcgacaacaacttccagaaaagtataaagaaatcttttttgatcaatcaaaaaacggatatgcaggttatattgatgggggagctagccaagaagaattttataaatttatcaaaccaattttagaaaaaatggatggtactgaggaattattggtgaaactaaatcgtgaagatttgctgcgcaagcaacggacctttgacaacggctctattccccatcaaattcacttgggtgagctgcatgctattttgagaagacaagaagacttttatccatttttaaaagacaatcgtgagaagattgaaaaaatcttgacttttcgaattccttattatgttggtccattggcgcgtggcaatagtcgttttgcatggatgactcggaagtctgaagaaacaattaccccatggaattttgaagaagttgtcgataaaggtgcttcagctcaatcatttattgaacgcatgacaaactttgataaaaatcttccaaatgaaaaagtactaccaaaacatagtttgctttatgagtattttacggtttataacgaattgacaaaggtcaaatatgttactgaaggaatgcgaaaaccagcatttctttcaggtgaacagaagaaagccattgttgatttactcttcaaaacaaatcgaaaagtaaccgttaagcaattaaaagaagattatttcaaaaaaatagaatgttttgatagtgttgaaatttcaggagttgaagatagatttaatgcttcattaggtacctaccatgatttgctaaaaattattaaagataaagattttttggataatgaagaaaatgaagatatcttagaggatattgttttaacattgaccttatttgaagatagggagatgattgaggaaagacttaaaacatatgctcacctctttgatgataaggtgatgaaacagcttaaacgtcgccgttatactggttggggacgtttgtctcgaaaattgattaatggtattagggataagcaatctggcaaaacaatattagattttttgaaatcagatggttttgccaatcgcaattttatgcagctgatccatgatgatagtttgacatttaaagaagacattcaaaaagcacaagtgtctggacaaggcgatagtttacatgaacatattgcaaatttagctggtagccctgctattaaaaaaggtattttacagactgtaaaagttgttgatgaattggtcaaagtaatggggcggcataagccagaaaatatcgttattgaaatggcacgtgaaaatcagacaactcaaaagggccagaaaaattcgcgagagcgtatgaaacgaatcgaagaaggtatcaaagaattaggaagtcagattcttaaagagcatcctgttgaaaatactcaattgcaaaatgaaaagctctatctctattatctccaaaatggaagagacatgtatgtggaccaagaattagatattaatcgtttaagtgattatgatgtcgatgccattgttccacaaagtttccttaaagacgattcaatagacaataaggtcttaacgcgttctgataaaaatcgtggtaaatcggataacgttccaagtgaagaagtagtcaaaaagatgaaaaactattggagacaacttctaaacgccaagttaatcactcaacgtaagtttgataatttaacgaaagctgaacgtggtggtttgagtgaacttgataaagctggttttatcaaacgccaattggttgaaactcgccaaatcactaagcatgtggcacaaattttggatagtcgcatgaatactaaatacgatgaaaatgataaacttattcgagaggttaaagtgattaccttaaaatctaaattagtttctgacttccgaaaagatttccaattctataaagtacgtgagattaacaattaccatcatgcccatgatgcgtatctaaatgccgtcgttggaactgctttgattaagaaatatccaaaacttgaatcggagtttgtctatggtgattataaagtttatgatgttcgtaaaatgattgctaagtctgagcaagaaataggcaaagcaaccgcaaaatatttcttttactctaatatcatgaacttcttcaaaacagaaattacacttgcaaatggagagattcgcaaacgccctctaatcgaaactaatggggaaactggagaaattgtctgggataaagggcgagattttgccacagtgcgcaaagtattgtccatgccccaagtcaatattgtcaagaaaacagaagtacagacaggcgaattctccaaggagtcaattttaccaaaaagaaattcggacaagcttattgctcgtaaaaaagactgggatccaaaaaaatatggtggttttgatagtccaacggtagcttattcagtcctagtggttgctaaggtggaaaaagggaaatcgaagaagttaaaatccgttaaagagttactagggatcacaattatggaaagaagttcctttgaaaaaaatccgattgactttttagaagctaaaggatataaggaagttaaaaaagacttaatcattaaactacctaaatatagtctttttgagttagaaaacggtcgtaaacggatgctggctagtgccggagaattacaaaaaggaaatgagctggctctgccaagcaaatatgtgaattttttatatttagctagtcattatgaaaagttgaagggtagtccagaagataacgaacaaaaacaattgtttgtggagcagcataagcattatttagatgagattattgagcaaatcagtgaattttctaagcgtgttattttagcagatgccaatttagataaagttcttagtgcatataacaaacatagagacaaaccaatacgtgaacaagcagaaaatattattcatttatttacgttgacgaatcttggagctcccgctgcttttaaatattttgatacaacaattgatcgtaaacgatatacgtctacaaaagaagttttagatgccactcttatccatcaatccatcactggtctttatgaaacacgcattgatttgagtcagctaggaggtgactgattctttgtacccgatacttgtgcctgttctatttccgaaccgaccgcttgtatgaatccatcaaaattcgttttctctatgttggattccttgttgctcatattgtgatgataatttctacaaatatagtcattggtaactatctatgaaactgtttgatacttttatagttgattaaacttgttcatggcatttgccttaatatcatccgctatgtcaatgtagggtttcatagctttgtagtcgctgtgtcccgtccatttcatgaccacctgtgccgggattccgagagccagcgcattgcagatgaatgtccttcttcctgcatgggtactgagcaaagcgtatttgggtgtgacttcatcaatacgttcatttcccttgtagtaggtttcccgtacaggctcgttgatttctgccagttcgcccagctctttcaggtaatcgttcatcttctggttgctgatgacgggcagagccatgtaattctcgaaatggatgtccttgtatttgtccagtatggctttgctgtatttgttcagttcaatcgtcaggctgtcggcagtcttgactgtggttatttcgatgtggtcggacttcacatcgcttcttttcagattgcgaacatccgaataccgcaaactcgtaaagcagcagaacaggaaaacatcacgcacacgttccaggtattgcttatccttgggtatctggtagtctttcagcttgttcagttcatcccaagtcaggaagattacttttttcgaggtggttttcagtttcggtttgaacgtatcgtatgcaatgttctgatgatgtcctttcctgaagctccagcgcaggaaccatttgaggaatcccatttgcttgccgatggtgctgtttctcatatccttggtgtcacgcaggaagttgacgtattcgttcaatccaaactcgttgaaatagttgaacgttgcatcctccttgaactctttgaggtggttcctcactgctgcaaatttttcataggtggatgccgtccagttattctggttaccgcactcttttacaaactcatcgaacacctcccaaaagctgacaggggcttcttccggctgttcttcactggtgtctttcattctcatgttgaaagcttccttcaactgttgggtcgttggcatgacctcctgcacctcaaattccttgaaaatattctggatttcggcatagtatttcagcaagtccgtattgatttcggctgcactttgctttagcttgttggtacatccgttctttacccgctgcttatctacatcccatttggctacgtcaatccggtagcccgttgtaaactcgatacgttggctggcaaagatgacacgcatacggatgggtacgttctctacgattggcacaccgttctttttccggctctccaatgcaaaaatgatgttgcgcttgatattcataattgggtgcgtttgaaattctacacccaaatatacacccaattattgagatagcaaaagacatttagaaacatttacttttactctatattgtaatttacacttgattatcagtcgtttgcagttttatgatattctgtgaaagtataagttcgagagcctgtctctccgcaaaaaacgctgaaaatcagcagattgcaaaacaaacaccctgttttacacccaagaatgtaaagtcggctgtttttgttttatttaagataatacaaccactacataataaaagagtagcgatattaaaagaatccgatgagaaaagactaatatttatctatccattcagtttgatttttcaggactttacatcgtcctgaaagtatttgttggtaccggtaccgaggacgcgtaaacatttacagttgcatgtggcctattgtttttagccgttaaatattttataactattaaatagcgatacaaattgttcgaaactaatattgtttatatcatatattctcgcatgttttaaagctttattaaattgattttttgtaaacagtttttcgtactctttgttaacccatttcattacaaaagtttcatatttttttctctctttaaatgccatttttgctggctttctttttaatacaattaatgtgctatccactttaggttttggatggaaataatacctaggaatttttgctaatatagaaatatctacctctgccattaacagcaatgctagtgatctgtttgtatctaataacattttagcaaaaccatattccactattaaataacttattgtggctgaactttcaaaaacaatttttcgaattatatttgtgcttatgttgtaaggtatgctgccaaatattttatatggattgtggctaggaaatgtaaatttcagtatatcatcatttactatttgatagttaggataatttaagagcttattacgagttacctcacataatttagaatcaatttctatcgccgttacaaaattacatctctttaccaatccagcagtaaaatgacctttccctgcacctatttcaaagatgttatctttttcatctaaacttatgcaattcattattttttctatgtgatattttgaagtaataaaattttgactatcttttatatttactttgttcattataacctctccttaatttattgcatctcttttcgaatatttatgttttttgagaaaagaacgtactcatggttcatcccgatatgcgtatcggtctgtatatcagcaactttctatgtgtttcaactacaatagtcatctattctcatctttctgagtccaccccctgcaaagcccctctttacgacataaaaattcggtcggaaaaggtatgcaaaagatgtttctctctttaagagaaactcttcgggatgcaaaaatatgaaaataactccaattcaccaaattatatagcgacttttttacaaaatgctaaaatttgttgatttccgtcaagcaattgttgagcaaaaatgtcttttacgataaaatgatacctcaatatcaactgtttagcaaaacgatatttctcttaaagagagaaacacctttttgttcaccaatccccgacttttaatcccgcggccatgattgaaaaaggaagagtatgagtattcaacatttccgtgtcgcccttattcccttttttgcggcattttgccttcctgtttttgctcacccagaaacgctggtgaaagtaaaagatgctgaagatcagttgggtgcacgagtgggttacatcgaactggatctcaacagcggtaagatccttgagagttttcgccccgaagaacgttttccaatgatgagcacttttaaagttctgctatgtggcgcggtattatcccgtattgacgccgggcaagagcaactcggtcgccgcatacactattctcagaatgacttggttgagtactcaccagtcacagaaaagcatcttacggatggcatgacagtaagagaattatgcagtgctgccataaccatgagtgataacactgcggccaacttacttctgacaacgatcggaggaccgaaggagctaaccgcttttttgcacaacatgggggatcatgtaactcgccttgatcgttgggaaccggagctgaatgaagccataccaaacgacgagcgtgacaccacgatgcctgtagcaatggcaacaacgttgcgcaaactattaactggcgaactacttactctagcttcccggcaacaattaatagactggatggaggcggataaagttgcaggaccacttctgcgctcggcccttccggctggctggtttattgctgataaatctggagccggtgagcgtgggtctcgcggtatcattgcagcactggggccagatggtaagccctcccgtatcgtagttatctacacgacggggagtcaggcaactatggatgaacgaaatagacagatcgctgagataggtgcctcactgattaagcattggtaactgtcagaccaagtttactcataacgcgtcaattcgagggggatcaattccgtgataggtgggctgcccttcctggttggcttggtttcatcagccatccgcttgccctcatctgttacgccggcggtagccggccagcctcgcagagcaggattcccgttgagcaccgccaggtgcgaataagggacagtgaagaaggaacacccgctcgcgggtgggcctacttcacctatcctgcccggctgacgccgttggatacaccaaggaaagtctacacgaaccctttggcaaaatcctgtatatcgtgcgaaaaaggatggatataccgaaaaaatcgctataatgaccccgaagcagggttatgcagcggaaaacggaattgatccggccacgatgcgtccggcgtagaggatctgaagatcagcagttcaacctgttgatagtacgtactaagctctcatgtttcacgtactaagctctcatgtttaacgtactaagctctcatgtttaacgaactaaaccctcatggctaacgtactaagctctcatggctaacgtactaagctctcatgtttcacgtactaagctctcatgtttgaacaataaaattaatataaatcagcaacttaaatagcctctaaggttttaagttttataagaaaaaaaagaatatataaggcttttaaagcttttaag

SEQ ID NO: 80 - DNA, 14356 bp, synthetic construct
  misc_feature 1..14356: note = Description of sequence: pBH512
  source 1..14356: mol_type = other DNA
gatgtaacgcactgagaagcccttagagcctctcaaagcaattttgagtgacacaggaacacttaacggctgacatgggaattcccctccaccgcggtgtattaatgcggctgcccctgtacaaagaaaattcgacaaactgttatttttctatctatttatttgaattgtgagcggataacaattacctttgtcggcaattgtgagcggataacaattatgagtcaggctgatgagtccgtgaggacgaaacgagtaagctcgtccctgacatcacattaccagtgttttagagctagaaatagcaagttaaaataaggctagtccgttatcaacttgaaaaagtggcaccgagtcggtgcttttttggccggcatggtcccagcctcctcgctggcgccggctgggcaacatgcttcggcatggcgaatgggacgcactctaatcgttatcggagtgcttttagattactaatcaaattgcttctactaattgcctatcttccagtgatggaacagcatttgaacgcattggctgcaacaatcagccttgatctggaagaagcaatgaaagctgctgttaagtctccgaatcaggtattgttcctgacaggtgtattcccatccggtaaacgcggatactttgcagttgatctgactcaggaataaattataaattaaggtaagaagattgtaggataagctaatgaaatagaaaaaggatgccgtcacacaacttgtcggcattcttttttgttttattagttgaaaatatagtgaaaaagttgcctaaatatgtatgttaacaaattatttgtcgtaactttgcactccaaatctgtttttaacatatggcactagtgaaaccagtaacgttatacgatgtcgcagagtatgccggtgtctcttatcagaccgtttcccgcgtggtgaaccaggccagccacgtttctgcgaaaacgcgggaaaaagtggaagcggcgatggcggagctgaattacattcccaaccgcgtggcacaacaactggcgggcaaacagtcgttgctgattggcgttgccacctccagtctggccctgcacgcgctgtcgcaaattgtcgcggcgattaaatctcgcgcctatcaactgggtgccagcgtgttcgtgtcgatggtagaacgaagcggcatcgaagcctgtaaaacggcggtgcacaatcttctcgcgcaacgcgtcagtgggctgatcattaactatccgctggataaccaggatgccattgctgtggaagctgcctgcactaatgttccggcgttatttcttgatgtctctgaccagacacccatcaacagtattattttctcccatgaagacggtacgcgactgggcgtggagcatctggtcgcattgggtcaccagcaaatcgcgctgttagcgggcccattaagttctgtctcggcgcgtctgcgtctggctggctggcataaatatctcactcgcaatcaaattcagccgatagcggaacgggaaggcgactggagtgccatgtccggttttcaacaaaccatgcaaatgctgaatgagggcatcgttcccactgcgatgctggttgccaacgatcagatggcgctgggcgcaatgcgcgccattaccgagaccgggctgcgcgttggtgcggatatctcggtagtgggatacgacgataccgaagacagctcatgttatatcccgccgttaaccaccatcaaacaggattttcgcctgctggggcaaaccagcgtggaccgcttgctgcaactctctcagggccaggcggtgaagggcaatcagctgttgcccgtctcactggtgaaaagaaaaaccaccctggcgcccaatacgcaaaccgcctctccccgcgcgttggccgattcattaatgcagctggcacgacaggtttcccgactggaaagcgggcagtgagtgcaacaatcagccttgatctggaagaagcaatgaaagctgctgttaagtctccgaatcaggtattgttcctgacaggtgtattcccatccggtaaacgcggatactttgcagttgatctgactcaggaataaattataaattaaggtaagaagattgtaggataagctaatgaaatagaaaaaggatgccgtcacacaacttgtcggcattcttttttgttttattagttgaaaatatagtgaaaaagttgcctaaatatgtatgttaacaaattatttgtcgtaactttgcactccaaatctgtttttaacatatggcactagtgaaaccagtaacgttatacgatgtcgcagagtatgccggtgtctcttatcagaccgtttcccgcgtggtgaaccaggccagccacgtttctgcgaaaacgcgggaaaaagtggaagcggcgatggcggagctcaattacattcccaaccgcgtggcacaacaactggcgggcaaagcgtcgcataccattggcatgttgatcactgccagtaccaatcctttctattcagaactggtgcgtggcgttgaacgcagctgcttcgaacgcggttatagtctcgatctttgcaataccgaaggcgatgaacagcggatgaatcgcaatctggaaacgctgatgcaaaaacgcgttgatggcttgctgttactgtgcaccgaaacgcatcaaccttcgcgtgaaatcatgcaacgttatccgacagtgcctactgtgatgatggactgggctccgttcgatggcgacagcgatcttattcaggataactcgttgctgggcggagacttagcaacgcaatatctgatcgataaaggtcatacccgtatcgcctgtattaccggcccgctggataaaactccggcgcgcctgcggttggaaggttatcgggcggcgatgaaacgtgcgggtctcaacattcctgatggctatgaagtcactggtgattttgaatttaacggcgggtttgacgctatgcgccaactgctatcacatccgctgcgtcctcaggccgtctttaccggaaatgacgctatggctgttggcgtttaccaggcgttatatcaggcagagttacaggttccgcaggatatcgcggtgattggctatgacgatatcgaactggcaagctttatgacgccaccattaaccactatccaccaaccgaaagatgaactgggggagctggcgattgatgtactcatccatcggataacccagccgacccttcagcaacaacgattacaacttactccgattctgatggaacgcggttcggcttagctggtgaaaagaaaaaccaccctggcgcccaatacgcaaaccgcctctccccgcgcgttggccgattcattaatgcagctggcacgacaggtttcccgactggaaagcgggcagtgagctttcctcggtaccaaattccagaaaagaggcctcccgaaaggggggccttttttcgttttggtcctacttgtgcctgttctatttccatcccaaatgctgctcggtaccaaagacgaacaataagacgctgaaaagcgtcttttttcgttttggtccgataaagtttggaagataaagctaaaagttcttatctttgcagtccgaaataaagacatataaaagaaaagacaccatggataagaaatactcaataggcttagctatcggcacaaatagcgtcggatgggcggtgatcactgatgaatataaggttccgtctaaaaagttcaaggttctgggaaatacagaccgccacagtatcaaaaaaaatcttataggggctcttttatttgacagtggagagacagcggaagcgactcgtctcaaacggacagctcgtagaaggtatacacgtcggaagaatcgtatttgttatctacaggagattttttcaaatgagatggcgaaagtagatgatagtttctttcatcgacttgaagagtcttttttggtggaagaagacaagaagcatgaacgtcatcctatttttggaaatatagtagatgaagttgcttatcatgagaaatatccaactatctatcatctgcgaaaaaaattggtagattctactgataaagcggatttgcgcttaatctatttggccttagcgcatatgattaagtttcgtggtcattttttgattgagggagatttaaatcctgataatagtgatgtggacaaactatttatccagttggtacaaacctacaatcaattatttgaagaaaaccctattaacgcaagtggagtagatgctaaagcgattctttctgcacgattgagtaaatcaagacgattagaaaatctcattgctcagctccccggtgagaagaaaaatggcttatttgggaatctcattgctttgtcattgggtttgacccctaattttaaatcaaattttgatttggcagaagatgctaaattacagctttcaaaagatacttacgatgatgatttagataatttattggcgcaaattggagatcaatatgctgatttgtttttggcagctaagaatttatcagatgctattttactttcagatatcctaagagtaaatactgaaataactaaggctcccctatcagcttcaatgattaaacgctacgatgaacatcatcaagacttgactcttttaaaagctttagttcgacaacaacttccagaaaagtataaagaaatcttttttgatcaatcaaaaaacggatatgcaggttatattgatgggggagctagccaagaagaattttataaatttatcaaaccaattttagaaaaaatggatggtactgaggaattattggtgaaactaaatcgtgaagatttgctgcgcaagcaacggacctttgacaacggctctattccccatcaaattcacttgggtgagctgcatgctattttgagaagacaagaagacttttatccatttttaaaagacaatcgtgagaagattgaaaaaatcttgacttttcgaattccttattatgttggtccattggcgcgtggcaatagtcgttttgcatggatgactcggaagtctgaagaaacaattaccccatggaattttgaagaagttgtcgataaaggtgcttcagctcaatcatttattgaacgcatgacaaactttgataaaaatcttccaaatgaaaaagtactaccaaaacatagtttgctttatgagtattttacggtttataacgaattgacaaaggtcaaatatgttactgaaggaatgcgaaaaccagcatttctttcaggtgaacagaagaaagccattgttgatttactcttcaaaacaaatcgaaaagtaaccgttaagcaattaaaagaagattatttcaaaaaaatagaatgttttgatagtgttgaaatttcaggagttgaagatagatttaatgcttcattaggtacctaccatgatttgctaaaaattattaaagataaagattttttggataatgaagaaaatgaagatatcttagaggatattgttttaacattgaccttatttgaagatagggagatgattgaggaaagacttaaaacatatgctcacctctttgatgataaggtgatgaaacagcttaaacgtcgccgttatactggttggggacgtttgtctcgaaaattgattaatggtattagggataagcaatctggcaaaacaatattagattttttgaaatcagatggttttgccaatcgcaattttatgcagctgatccatgatgatagtttgacatttaaagaagacattcaaaaagcacaagtgtctggacaaggcgatagtttacatgaacatattgcaaatttagctggtagccctgctattaaaaaaggtattttacagactgtaaaagttgttgatgaattggtcaaagtaatggggcggcataagccagaaaatatcgttattgaaatggcacgtgaaaatcagacaactcaaaagggccagaaaaattcgcgagagcgtatgaaacgaatcgaagaaggtatcaaagaattaggaagtcagattcttaaagagcatcctgttgaaaatactcaattgcaaaatgaaaagctctatctctattatctccaaaatggaagagacatgtatgtggaccaagaattagatattaatcgtttaagtgattatgatgtcgatgccattgttccacaaagtttccttaaagacgattcaatagacaataaggtcttaacgcgttctgataaaaatcgtggtaaatcggataacgttccaagtgaagaagtagtcaaaaagatgaaaaactattggagacaacttctaaacgccaagttaatcactcaacgtaagtttgataatttaacgaaagctgaacgtggtggtttgagtgaacttgataaagctggttttatcaaacgccaattggttgaaactcgccaaatcactaagcatgtggcacaaattttggatagtcgcatgaatactaaatacgatgaaaatgataaacttattcgagaggttaaagtgattaccttaaaatctaaattagtttctgacttccgaaaagatttccaattctataaagtacgtgagattaacaattaccatcatgcccatgatgcgtatctaaatgccgtcgttggaactgctttgattaagaaatatccaaaacttgaatcggagtttgtctatggtgattataaagtttatgatgttcgtaaaatgattgctaagtctgagcaagaaataggcaaagcaaccgcaaaatatttcttttactctaatatcatgaacttcttcaaaacagaaattacacttgcaaatggagagattcgcaaacgccctctaatcgaaactaatggggaaactggagaaattgtctgggataaagggcgagattttgccacagtgcgcaaagtattgtccatgccccaagtcaatattgtcaagaaaacagaagtacagacaggcgaattctccaaggagtcaattttaccaaaaagaaattcggacaagcttattgctcgtaaaaaagactgggatccaaaaaaatatggtggttttgatagtccaacggtagcttattcagtcctagtggttgctaaggtggaaaaagggaaatcgaagaagttaaaatccgttaaagagttactagggatcacaattatggaaagaagttcctttgaaaaaaatccgattgactttttagaagctaaaggatataaggaagttaaaaaagacttaatcattaaactacctaaatatagtctttttgagttagaaaacggtcgtaaacggatgctggctagtgccggagaattacaaaaaggaaatgagctggctctgccaagcaaatatgtgaattttttatatttagctagtcattatgaaaagttgaagggtagtccagaagataacgaacaaaaacaattgtttgtggagcagcataagcattatttagatgagattattgagcaaatcagtgaattttctaagcgtgttattttagcagatgccaatttagataaagttcttagtgcatataacaaacatagagacaaaccaatacgtgaacaagcagaaaatattattcatttatttacgttgacgaatcttggagctcccgctgcttttaaatattttgatacaacaattgatcgtaaacgatatacgtctacaaaagaagttttagatgccactcttatccatcaatccatcactggtctttatgaaacacgcattgatttgagtcagctaggaggtgactgattctttgtacccgataattgcctatcttccagtgatggaacagcatttgtgcattggctgcaacaatcagccttacttgtgcctgttctatttccgaaccgaccgcttgtatgaatgcatcaaaattcgttttctctacgttggattccttgttgctcatattgtgatgataatttctacaaatatagtcattggtaactatctatgaaactgtttgatacttttatcagtctaatagttttacaaggtctttcttcatttcttcgtcaatatccctgtatcgtctgaaagctttgcttccctccttgtgtcccgacagtgcggaaacaaggttcgggtctttcacttttttatagatattgccgataaacgtacgtcttgccagatggctgcttgccacttcataaataggtcgtttgatttcgttgtgcgtcaacgggtctaagattgttacgatgcggtcaactccagctaatttgaatatcttttttatggcatcattgtacttttgctcggatatgaacggcaacagttttccctcatattctttgtagcgttcaaggatttctttcgctttgtcgttaagtggaacacgtaccgtaaccggattcccctctttggttttcttgggaatatattctatggcttcattgaccacatttagtttggtcattcggtacaggtcgctcaccctgcatcctatcagtgtctgaaatatgaatatatccctctgtattgccagttgtggggtggcagaaaggtctgcattaaaaatcctgtccctttcttcgagtgttatataataaggtgtaccatatgtacactcctctatcggaaacttgtcgaaaggtctgtttgtggtgcgtttgttatcgaagcaccacaggaagaatgtgcgtattcttgaaaaacagtctatcagcgtgtttttgcttctgggctgtggtgtcctcttttcgggaatggcttcataaatgctcgggtaaagttcataatactggtattcgttctgaaagaaatcccacatatcccgaagcgtgtcaggtgttaccaaatccacatcaaggataaagcccttttgtcctctctttgtagcccttacatatagttcataacgcagtaaggctcttttgacaacccggaaatttttctttcgtacttccgacaaagggtgcttgtttagaaattcatcgaatagttctccaatggtaggcttgataaccacttcctccggcaaaaaatatttttcaggatggtaaaatttatcaagtgttgtttttagccattctttgtctattgcttccttttcttgttgatataccttctcgatataggttttcaactggcgtatctcttcatttatatgggtacgcatttcttcattgcagacagctttcgtttttacacattcgtctttatcatcccatagattgggattgatggctaactgagtaggagcaacggagtctaactgccttccgtttctaaaacggacatagattgtagccatggattctgtatcatatcgtttggctgcttttttaatgataaaggttactttcatagactttcaggttgaattttactctgctgcaaatataaatattttccccagcattttccccacatctgctaaatattttgcaattcgattaaacttggattaaaatttaataggattataacatattgaaatacagtgtaattgtggcgtttttccgcatttttctttttacccacattttccccactttaattatttcaaatgcggggtctgggtacaagaaagaaagctaagtatttgatagttcaatacttagctttttcttttgcttgaattttccccacattttccccacacgtgcaaaaaatatagcagtaagtcattatttcttttggttgaacgtagagagtagcgatattaaaagaatccgatgagaaaagactaatatttatctatccattcagtttgatttttcaggactttacatcgtcctgaaagtatttgttggtaccggtaccgaggacgcgtaaacatttacagttgcatgtggcctattgtttaggacgcgttatctccttaacgtacgttttcgttccattggccctcaaaccccgttatatacattcatgtccatttatgtaaaaaatcctgctgaccttgtttatgtcttgtcagtcaccatttgcaaaaccatatttgaccctcaaagaggctgaatttgataagcaacttgctacatactcataataaggagctaaatagaacacgaatgggaaatactcaaatgccaaactaaagaagatattggccaaaataaacgctataccgagagagaaacttgatttttcaacttcctaaccaacagtgttgttcaaacatttctacttatttgtacttaccagttgaacctacgtttccctaataaaatgtctatggtaaaaagttaaaaaatcctcctacttttgttagatatatttttttgtgtaattttgtaatcgttatgcggcagtaataatatacatattaatacgagttaggaatcctgtagttctcatatgctacgaggaggtattaaaaggtgcgtttcgacaatgcatctattgtagtatattattgcttaatccaaatgaatattataaatttaggaattcttgctcacattgatgcaggaaaaacttccgtaaccgagaatctgctgtttgccagtggagcaacggaaaagtgcggctgtgtggataatggtgacaccataacggactctatggatatagagaaacgtagaggaattactgttcgggcttctacgacatctattatctggaatggtgtgaaatgcaatatcattgacactccgggacacatggattttattgcggaagtggagcggacattcaaaatgcttgatggagcagtcctcatcttatccgcaaaggaaggcatacaagcgcagacaaagttgctgttcaatactttacagaagctgcaaatcccgacaattatatttatcaataagattgaccgagccggtgtgaatttggagcgtttgtatctggatataaaagcaaatctgtctcaagatgtcctgtttatgcaaaatgttgtcgatggatcggtttatccggtttgctcccaaacatatataaaggaagaatacaaagaatttgtatgcaaccatgacgacaatatattagaacgatatttggcggatagcgaaatttcaccggctgattattggaatacgataatcgctcttgtggcaaaagccaaagtctatccggtgctacatggatcagcaatgttcaatatcggtatcaatgagttgttggacgccatcacttcttttatacttcctccggcatcggtctcaaacagactttcatcttatctttataagatagagcatgaccccaaaggacataaaagaagttttctaaaaataattgacggaagtctgagacttcgagacgttgtaagaatcaacgattcggaaaaattcatcaagattaaaaatctaaaaactatcaatcagggcagagagataaatgttgatgaagtgggcgccaatgatatcgcgattgtagaggatatggatgattttcgaatcggaaattatttaggtgctgaaccttgtttgattcaaggattatcgcatcagcatcccgctctcaaatcctccgtccggccagacaggcccgaagagagaagcaaggtgatatccgctctgaatacattgtggattgaagacccgtctttgtccttttccataaactcatatagtgatgaattggaaatctcgttatatggtttaacccaaaaggaaatcatacagacattgctggaagaacgattttccgtaaaggtccattttgatgagatcaagactatatacaaagaacgacctgtaaaaaaggtcaataagattattcagatcgaagtgccgcccaacccttattgggccacaatagggctgactcttgaacccttaccgttagggacagggttgcaaatcgaaagtgacatctcctatggttatctgaaccattcttttcaaaatgccgtttttgaagggattcgtatgtcttgccaatccgggttacatggatgggaagtgactgatctgaaagtaacttttactcaagccgagtattatagcccggtaagtacacctgctgatttcagacagctgaccccttatgtcttcaggctggccttgcaacagtcaggtgtggacattctcgaaccgatgctctattttgagttgcagataccccaagcggcaagttccaaagctattacagatttgcaaaaaatgatgtctgagattgaagacatcagttgcaataatgagtggtgtcatattaaagggaaagttccattaaatacaagtaaagactatgcatcagaagtaagttcatacactaagggcttaggcatttttatggttaagccatgcgggtatcaaataacaaaaggcggttattctgataatatccgcatgaacgaaaaagataaacttttattcatgttccaaaaatcaatgtcatcaaaataatggtataacctctccttaatttattgcatctcttttcgaatatttatgttttttgagaaaagaacgtactcatggttcatcccgatatgcgtatcggtctgtatatcagcaactttctatgtgtttcaactacaatagtcatctattctcatctttctgagtccaccccctgcaaagcccctctttacgacataaaaattcggtcggaaaaggtatgcaaaagatgtttctctctttaagagaaactcttcgggatgcaaaaatatgaaaataactccaattcaccaaattatatagcgacttttttacaaaatgctaaaatttgttgatttccgtcaagcaattgttgagcaaaaatgtcttttacgataaaatgatacctcaatatcaactgtttagcaaaacgatatttctcttaaagagagaaacacctttttgttcaccaatccccgacttttaatcccgcggccatgattgaaaaaggaagagtatgagtattcaacatttccgtgtcgcccttattcccttttttgcggcattttgccttcctgtttttgctcacccagaaacgctggtgaaagtaaaagatgctgaagatcagttgggtgcacgagtgggttacatcgaactggatctcaacagcggtaagatccttgagagttttcgccccgaagaacgttttccaatgatgagcacttttaaagttctgctatgtggcgcggtattatcccgtattgacgccgggcaagagcaactcggtcgccgcatacactattctcagaatgacttggttgagtactcaccagtcacagaaaagcatcttacggatggcatgacagtaagagaattatgcagtgctgccataaccatgagtgataacactgcggccaacttacttctgacaacgatcggaggaccgaaggagctaaccgcttttttgcacaacatgggggatcatgtaactcgccttgatcgttgggaaccggagctgaatgaagccataccaaacgacgagcgtgacaccacgatgcctgtagcaatggcaacaacgttgcgcaaactattaactggcgaactacttactctagcttcccggcaacaattaatagactggatggaggcggataaagttgcaggaccacttctgcgctcggcccttccggctggctggtttattgctgataaatctggagccggtgagcgtgggtcacgcggtatcattgcagcactggggccagatggtaagccctcccgtatcgtagttatctacacgacggggagtcaggcaactatggatgaacgaaatagacagatcgctgagataggtgcctcactgattaagcattggtaactgtcagaccaagtttactcataacgcgtcaattcgagggggatcaattccgtgataggtgggctgcccttcctggttggcttggtttcatcagccatccgcttgccctcatctgttacgccggcggtagccggccagcctcgcagagcaggattcccgttgagcaccgccaggtgcgaataagggacagtgaagaaggaacacccgctcgcgggtgggcctacttcacctatcctgcccggctgacgccgttggatacaccaaggaaagtctacacgaaccctttggcaaaatcctgtatatcgtgcgaaaaaggatggatataccgaaaaaatcgctataatgaccccgaagcagggttatgcagcggaaaacggaattgatccggccacgatgcgtccggcgtagaggatctgaagatcagcagttcaacctgttgatagtacgtactaagctctcatgtttcacgtactaagctctcatgtttaacgtactaagctctcatgtttaacgaactaaaccctcatggctaacgtactaagctctcatggctaacgtactaagctctcatgtttcacgtactaagctctcatgtttgaacaataaaattaatataaatcagcaacttaaatagcctctaaggttttaagttttataagaaaaaaaagaatatataaggcttttaaagcttttaaggtttaacggttgtggacaacaagccagg

SEQ ID NO: 81 - DNA, 14224 bp, synthetic construct
  misc_feature 1..14224: note = Description of sequence: pBH513
  source 1..14224: mol_type = other DNA
gatgtaacgcactgagaagcccttagagcctctcaaagcaattttgagtgacacaggaacacttaacggctgacatgggaattcccctccaccgcggtgtattaatgcggctgcccctgtacaaagaaaattcgacaaactgttatttttctatctatttatttgaattttgagcgctcaaaatttacctttgtcggcaattttgagcgctcaaaattatgagtcaggctgatgagtccgtgaggacgaaacgagtaagctcgtccctgacatcacattaccagtgttttagagctagaaatagcaagttaaaataaggctagtccgttatcaacttgaaaaagtggcaccgagtcggtgcttttttggccggcatggtcccagcctcctcgctggcgccggctgggcaacatgcttcggcatggcgaatgggacgcactctaatcgttatcggagtgcttttagattactaatcaaattgcttctactaattgcctatcttccagtgatggaacagcatttgaacgcattggctgcaacaatcagccttgatctggaagaagcaatgaaagctgctgttaagtctccgaatcaggtattgttcctgacaggtgtattcccatccggtaaacgcggatactttgcagttgatctgactcaggaataaattataaattaaggtaagaagattgtaggataagctaatgaaatagaaaaaggatgccgtcacacaacttgtcggcattcttttttgttttattagttgaaaatatagtgaaaaagttgcctaaatatgtatgttaacaaattatttgtcgtaactttgcactccaaatctgtttttaacatatggcactagtgaaaccagtaacgttatacgatgtcgcagagtatgccggtgtctcttatcagaccgtttcccgcgtggtgaaccaggccagccacgtttctgcgaaaacgcgggaaaaagtggaagcggcgatggcggagctgaattacattcccaaccgcgtggcacaacaactggcgggcaaacagtcgttgctgattggcgttgccacctccagtctggccctgcacgcgctgtcgcaaattgtcgcggcgattaaatctcgcgcctatcaactgggtgccagcgtgttcgtgtcgatggtagaacgaagcggcatcgaagcctgtaaaacggcggtgcacaatcttctcgcgcaacgcgtcagtgggctgatcattaactatccgctggataaccaggatgccattgctgtggaagctgcctgcactaatgttccggcgttatttcttgatgtctctgaccagacacccatcaacagtattattttctcccatgaagacggtacgcgactgggcgtggagcatctggtcgcattgggtcaccagcaaatcgcgctgttagcgggcccattaagttctgtctcggcgcgtctgcgtctggctggctggcataaatatctcactcgcaatcaaattcagccgatagcggaacgggaaggcgactggagtgccatgtccggttttcaacaaaccatgcaaatgctgaatgagggcatcgttcccactgcgatgctggttgccaacgatcagatggcgctgggcgcaatgcgcgccattaccgagaccgggctgcgcgttggtgcggatatctcggtagtgggatacgacgataccgaagacagctcatgttatatcccgccgttaaccaccatcaaacaggattttcgcctgctggggcaaaccagcgtggaccgcttgctgcaactctctcagggccaggcggtgaagggcaatcagctgttgcccgtctcactggtgaaaagaaaaaccaccctggcgcccaatacgcaaaccgcctctccccgcgcgttggccgattcattaatgcagctggcacgacaggtttcccgactggaaagcgggcagtgagcaaatgctgttccatcactggaagataggcaattagtagaagcaatttgattagtaatctaaaagcactccgataacgattagagtgcttttagattgtttatcattaattatcaaagcaagtgcagttcatcactgcccgctttccagtcgggaaacctgtcgtgccagctgcattaatgaatcggccaacgcgcggggagaggcggtttgcgtattgggcgccagggtggtttttcttttcaccagctaagccgaaccgcgttccatcagaatcggagtaagttgtaatcgttgttgctgaagggtcggctgggttatccgatggatgagtacatcaatcgccagctcccccagttcatctttcggttggtggatagtggttaatggtggcgtcataaagcttgccagttcgatatcgtcatagccaatcaccgcgatatcctgcggaacctgtaactctgcctgatataacgcctggtaaacgccaacagccatagcgtcatttccggtaaagacggcctgaggacgcagcggatgtgatagcagttggcgcatagcgtcaaacccgccgttaaattcaaaatcaccagtgacttcatagccatcaggaatgttgagacccgcacgtttcatcgccgcccgataaccttccaaccgcaggcgcgccggagttttatccagcgggccggtaatacaggcgatacgggtatgacctttatcgatcagatattgcgttgctaagtctccgcccagcaacgagttatcctgaataagatcgctgtcgccatcgaacggagcccagtccatcatcacagtaggcactgtcggataacgttgcatgatttcacgcgaaggttgatgcgtttcggtgcacagtaacagcaagccatcaacgcgtttttgcatcagcgtttccagattgcgattcatccgctgttcatcgccttcggtattgcaaaggacgagactataaccgcgttcgaagcagctgcgttcaacgccacgcaccagttctgaatagaaaggattggtactggcagtgatcaacatgccaatggtatgcgacgctttgcccgccagttgttgtgccacgcggttgggaatgtaattgagctccgccatcgccgcttccactttttcccgcgttttcgcagaaacgtggctggcctggttcaccaccagggaaacggtgcttttagagacaccggcatactctgcgacatcgtataacgttactggtttcacgtttatattatttatatttgtttgacgagaatatctttatttaattgttatccgctcacaattgccgacaaaggtaattgttatccgctcacaattcaaataaatagatagaaaaataacagtttgtcgaattttctttgtacatcctgagatcccaaatgctgctcggtaccaaagacgaacaataagacgctgaaaagcgtcttttttcgttttggtccgataaagtttggaagataaagctaaaagttcttatctttgcagtccgaaataaagacatataaaagaaaagacaccatggataagaaatactcaataggcttagctatcggcacaaatagcgtcggatgggcggtgatcactgatgaatataaggttccgtctaaaaagttcaaggttctgggaaatacagaccgccacagtatcaaaaaaaatcttataggggctcttttatttgacagtggagagacagcggaagcgactcgtctcaaacggacagctcgtagaaggtatacacgtcggaagaatcgtatttgttatctacaggagattttttcaaatgagatggcgaaagtagatgatagtttctttcatcgacttgaagagtcttttttggtggaagaagacaagaagcatgaacgtcatcctatttttggaaatatagtagatgaagttgcttatcatgagaaatatccaactatctatcatctgcgaaaaaaattggtagattctactgataaagcggatttgcgcttaatctatttggccttagcgcatatgattaagtttcgtggtcattttttgattgagggagatttaaatcctgataatagtgatgtggacaaactatttatccagttggtacaaacctacaatcaattatttgaagaaaaccctattaacgcaagtggagtagatgctaaagcgattctttctgcacgattgagtaaatcaagacgattagaaaatctcattgctcagctccccggtgagaagaaaaatggcttatttgggaatctcattgctttgtcattgggtttgacccctaattttaaatcaaattttgatttggcagaagatgctaaattacagctttcaaaagatacttacgatgatgatttagataatttattggcgcaaattggagatcaatatgctgatttgtttttggcagctaagaatttatcagatgctattttactttcagatatcctaagagtaaatactgaaataactaaggctcccctatcagcttcaatgattaaacgctacgatgaacatcatcaagacttgactcttttaaaagctttagttcgacaacaacttccagaaaagtataaagaaatcttttttgatcaatcaaaaaacggatatgcaggttatattgatgggggagctagccaagaagaattttataaatttatcaaaccaattttagaaaaaatggatggtactgaggaattattggtgaaactaaatcgtgaagatttgctgcgcaagcaacggacctttgacaacggctctattccccatcaaattcacttgggtgagctgcatgctattttgagaagacaagaagacttttatccatttttaaaagacaatcgtgagaagattgaaaaaatcttgacttttcgaattccttattatgttggtccattggcgcgtggcaatagtcgttttgcatggatgactcggaagtctgaagaaacaattaccccatggaattttgaagaagttgtcgataaaggtgcttcagctcaatcatttattgaacgcatgacaaactttgataaaaatcttccaaatgaaaaagtactaccaaaacatagtttgctttatgagtattttacggtttataacgaattgacaaaggtcaaatatgttactgaaggaatgcgaaaaccagcatttctttcaggtgaacagaagaaagccattgttgatttactcttcaaaacaaatcgaaaagtaaccgttaagcaattaaaagaagattatttcaaaaaaatagaatgttttgatagtgttgaaatttcaggagttgaagatagatttaatgcttcattaggtacctaccatgatttgctaaaaattattaaagataaagattttttggataatgaagaaaatgaagatatcttagaggatattgttttaacattgaccttatttgaagatagggagatgattgaggaaagacttaaaacatatgctcacctctttgatgataaggtgatgaaacagcttaaacgtcgccgttatactggttggggacgtttgtctcgaaaattgattaatggtattagggataagcaatctggcaaaacaatattagattttttgaaatcagatggttttgccaatcgcaattttatgcagctgatccatgatgatagtttgacatttaaagaagacattcaaaaagcacaagtgtctggacaaggcgatagtttacatgaacatattgcaaatttagctggtagccctgctattaaaaaaggtattttacagactgtaaaagttgttgatgaattggtcaaagtaatggggcggcataagccagaaaatatcgttattgaaatggcacgtgaaaatcagacaactcaaaagggccagaaaaattcgcgagagcgtatgaaacgaatcgaagaaggtatcaaagaattaggaagtcagattcttaaagagcatcctgttgaaaatactcaattgcaaaatgaaaagctctatctctattatctccaaaatggaagagacatgtatgtggaccaagaattagatattaatcgtttaagtgattatgatgtcgatgccattgttccacaaagtttccttaaagacgattcaatagacaataaggtcttaacgcgttctgataaaaatcgtggtaaatcggataacgttccaagtgaagaagtagtcaaaaagatgaaaaactattggagacaacttctaaacgccaagttaatcactcaacgtaagtttgataatttaacgaaagctgaacgtggtggtttgagtgaacttgataaagctggttttatcaaacgccaattggttgaaactcgccaaatcactaagcatgtggcacaaattttggatagtcgcatgaatactaaatacgatgaaaatgataaacttattcgagaggttaaagtgattaccttaaaatctaaattagtttctgacttccgaaaagatttccaattctataaagtacgtgagattaacaattaccatcatgcccatgatgcgtatctaaatgccgtcgttggaactgctttgattaagaaatatccaaaacttgaatcggagtttgtctatggtgattataaagtttatgatgttcgtaaaatgattgctaagtctgagcaagaaataggcaaagcaaccgcaaaatatttcttttactctaatatcatgaacttcttcaaaacagaaattacacttgcaaatggagagattcgcaaacgccctctaatcgaaactaatggggaaactggagaaattgtctgggataaagggcgagattttgccacagtgcgcaaagtattgtccatgccccaagtcaatattgtcaagaaaacagaagtacagacaggcgaattctccaaggagtcaattttaccaaaaagaaattcggacaagcttattgctcgtaaaaaagactgggatccaaaaaaatatggtggttttgatagtccaacggtagcttattcagtcctagtggttgctaaggtggaaaaagggaaatcgaagaagttaaaatccgttaaagagttactagggatcacaattatggaaagaagttcctttgaaaaaaatccgattgactttttagaagctaaaggatataaggaagttaaaaaagacttaatcattaaactacctaaatatagtctttttgagttagaaaacggtcgtaaacggatgctggctagtgccggagaattacaaaaaggaaatgagctggctctgccaagcaaatatgtgaattttttatatttagctagtcattatgaaaagttgaagggtagtccagaagataacgaacaaaaacaattgtttgtggagcagcataagcattatttagatgagattattgagcaaatcagtgaattttctaagcgtgttattttagcagatgccaatttagataaagttcttagtgcatataacaaacatagagacaaaccaatacgtgaacaagcagaaaatattattcatttatttacgttgacgaatcttggagctcccgctgcttttaaatattttgatacaacaattgatcgtaaacgatatacgtctacaaaagaagttttagatgccactcttatccatcaatccatcactggtctttatgaaacacgcattgatttgagtcagctaggaggtgactgattctttgtacccgataattgcctatcttccagtgatggaacagcatttgtgcattggctgcaacaatcagccttacttgtgcctgttctatttccgaaccgaccgcttgtatgaatgcatcaaaattcgttttctctacgttggattccttgttgctcatattgtgatgataatttctacaaatatagtcattggtaactatctatgaaactgtttgatacttttatcagtctaatagttttacaaggtctttcttcatttcttcgtcaatatccctgtatcgtctgaaagctttgcttccctccttgtgtcccgacagtgcggaaacaaggttcgggtctttcacttttttatagatattgccgataaacgtacgtcttgccagatggctgcttgccacttcataaataggtcgtttgatttcgttgtgcgtcaacgggtctaagattgttacgatgcggtcaactccagctaatttgaatatcttttttatggcatcattgtacttttgctcggatatgaacggcaacagttttccctcatattctttgtagcgttcaaggatttctttcgctttgtcgttaagtggaacacgtaccgtaaccggattcccctctttggttttcttgggaatatattctatggcttcattgaccacatttagtttggtcattcggtacaggtcgctcaccctgcatcctatcagtgtctgaaatatgaatatatccctctgtattgccagttgtggggtggcagaaaggtctgcattaaaaatcctgtccctttcttcgagtgttatataataaggtgtaccatatgtacactcctctatcggaaacttgtcgaaaggtctgtttgtggtgcgtttgttatcgaagcaccacaggaagaatgtgcgtattcttgaaaaacagtctatcagcgtgtttttgcttctgggctgtggtgtcctcttttcgggaatggcttcataaatgctcgggtaaagttcataatactggtattcgttctgaaagaaatcccacatatcccgaagcgtgtcaggtgttaccaaatccacatcaaggataaagcccttttgtcctctctttgtagcccttacatatagttcataacgcagtaaggctcttttgacaacccggaaatttttctttcgtacttccgacaaagggtgcttgtttagaaattcatcgaatagttctccaatggtaggcttgataaccacttcctccggcaaaaaatatttttcaggatggtaaaatttatcaagtgttgtttttagccattctttgtctattgcttccttttcttgttgatataccttctcgatataggttttcaactggcgtatctcttcatttatatgggtacgcatttcttcattgcagacagctttcgtttttacacattcgtctttatcatcccatagattgggattgatggctaactgagtaggagcaacggagtctaactgccttccgtttctaaaacggacatagattgtagccatggattctgtatcatatcgtttggctgcttttttaatgataaaggttactttcatagactttcaggttgaattttactctgctgcaaatataaatattttccccagcattttccccacatctgctaaatattttgcaattcgattaaacttggattaaaatttaataggattataacatattgaaatacagtgtaattgtggcgtttttccgcatttttctttttacccacattttccccactttaattatttcaaatgcggggtctgggtacaagaaagaaagctaagtatttgatagttcaatacttagctttttcttttgcttgaattttccccacattttccccacacgtgcaaaaaatatagcagtaagtcattatttcttttggttgaacgtagagagtagcgatattaaaagaatccgatgagaaaagactaatatttatctatccattcagtttgatttttcaggactttacatcgtcctgaaagtatttgttggtaccggtaccgaggacgcgtaaacatttacagttgcatgtggcctattgtttaggacgcgttatctccttaacgtacgttttcgttccattggccctcaaaccccgttatatacattcatgtccatttatgtaaaaaatcctgctgaccttgtttatgtcttgtcagtcaccatttgcaaaaccatatttgaccctcaaagaggctgaatttgataagcaacttgctacatactcataataaggagctaaatagaacacgaatgggaaatactcaaatgccaaactaaagaagatattggccaaaataaacgctataccgagagagaaacttgatttttcaacttcctaaccaacagtgttgttcaaacatttctacttatttgtacttaccagttgaacctacgtttccctaataaaatgtctatggtaaaaagttaaaaaatcctcctacttttgttagatatatttttttgtgtaattttgtaatcgttatgcggcagtaataatatacatattaatacgagttaggaatcctgtagttctcatatgctacgaggaggtattaaaaggtgcgtttcgacaatgcatctattgtagtatattattgcttaatccaaatgaatattataaatttaggaattcttgctcacattgatgcaggaaaaacttccgtaaccgagaatctgctgtttgccagtggagcaacggaaaagtgcggctgtgtggataatggtgacaccataacggactctatggatatagagaaacgtagaggaattactgttcgggcttctacgacatctattatctggaatggtgtgaaatgcaatatcattgacactccgggacacatggattttattgcggaagtggagcggacattcaaaatgcttgatggagcagtcctcatcttatccgcaaaggaaggcatacaagcgcagacaaagttgctgttcaatactttacagaagctgcaaatcccgacaattatatttatcaataagattgaccgagccggtgtgaatttggagcgtttgtatctggatataaaagcaaatctgtctcaagatgtcctgtttatgcaaaatgttgtcgatggatcggtttatccggtttgctcccaaacatatataaaggaagaatacaaagaatttgtatgcaaccatgacgacaatatattagaacgatatttggcggatagcgaaatttcaccggctgattattggaatacgataatcgctcttgtggcaaaagccaaagtctatccggtgctacatggatcagcaatgttcaatatcggtatcaatgagttgttggacgccatcacttcttttatacttcctccggcatcggtctcaaacagactttcatcttatctttataagatagagcatgaccccaaaggacataaaagaagttttctaaaaataattgacggaagtctgagacttcgagacgttgtaagaatcaacgattcggaaaaattcatcaagattaaaaatctaaaaactatcaatcagggcagagagataaatgttgatgaagtgggcgccaatgatatcgcgattgtagaggatatggatgattttcgaatcggaaattatttaggtgctgaaccttgtttgattcaaggattatcgcatcagcatcccgctctcaaatcctccgtccggccagacaggcccgaagagagaagcaaggtgatatccgctctgaatacattgtggattgaagacccgtctttgtccttttccataaactcatatagtgatgaattggaaatctcgttatatggtttaacccaaaaggaaatcatacagacattgctggaagaacgattttccgtaaaggtccattttgatgagatcaagactatatacaaagaacgacctgtaaaaaaggtcaataagattattcagatcgaagtgccgcccaacccttattgggccacaatagggctgactcttgaacccttaccgttagggacagggttgcaaatcgaaagtgacatctcctatggttatctgaaccattcttttcaaaatgccgtttttgaagggattcgtatgtcttgccaatccgggttacatggatgggaagtgactgatctgaaagtaacttttactcaagccgagtattatagcccggtaagtacacctgctgatttcagacagctgaccccttatgtcttcaggctggccttgcaacagtcaggtgtggacattctcgaaccgatgctctattttgagttgcagataccccaagcggcaagttccaaagctattacagatttgcaaaaaatgatgtctgagattgaagacatcagttgcaataatgagtggtgtcatattaaagggaaagttccattaaatacaagtaaagactatgcatcagaagtaagttcatacactaagggcttaggcatttttatggttaagccatgcgggtatcaaataacaaaaggcggttattctgataatatccgcatgaacgaaaaagataaacttttattcatgttccaaaaatcaatgtcatcaaaataatggtataacctctccttaatttattgcatctcttttcgaatatttatgttttttgagaaaagaacgtactcatggttcatcccgatatgcgtatcggtctgtatatcagcaactttctatgtgtttcaactacaatagtcatctattctcatctttctgagtccaccccctgcaaagcccctctttacgacataaaaattcggtcggaaaaggtatgcaaaagatgtttctctctttaagagaaactcttcgggatgcaaaaatatgaaaataactccaattcaccaaattatatagcgacttttttacaaaatgctaaaatttgttgatttccgtcaagcaattgttgagcaaaaatgtcttttacgataaaatgatacctcaatatcaactgtttagcaaaacgatatttctcttaaagagagaaacacctttttgttcaccaatccccgacttttaatcccgcggccatgattgaaaaaggaagagtatgagtattcaacatttccgtgtcgcccttattcccttttttgcggcattttgccttcctgtttttgctcacccagaaacgctggtgaaagtaaaagatgctgaagatcagttgggtgcacgagtgggttacatcgaactggatctcaacagcggtaagatccttgagagttttcgccccgaagaacgttttccaatgatgagcacttttaaagttctgctatgtggcgcggtattatcccgtattgacgccgggcaagagcaactcggtcgccgcatacactattctcagaatgacttggttgagtactcaccagtcacagaaaagcatcttacggatggcatgacagtaagagaattatgcagtgctgccataaccatgagtgataacactgcggccaacttacttctgacaacgatcggaggaccgaaggagctaaccgcttttttgcacaacatgggggatcatgtaactcgccttgatcgttgggaaccggagctgaatgaagccataccaaacgacgagcgtgacaccacgatgcctgtagcaatggcaacaacgttgcgcaaactattaactggcgaactacttactctagcttcccggcaacaattaatagactggatggaggcggataaagttgcaggaccacttctgcgctcggcccttccggctggctggtttattgctgataaatctggagccggtgagcgtgggtcacgcggtatcattgcagcactggggccagatggtaagccctcccgtatcgtagttatctacacgacggggagtcaggcaactatggatgaacgaaatagacagatcgctgagataggtgcctcactgattaagcattggtaactgtcagaccaagtttactcataacgcgtcaattcgagggggatcaattccgtgataggtgggctgcccttcctggttggcttggtttcatcagccatccgcttgccctcatctgttacgccggcggtagccggccagcctcgcagagcaggattcccgttgagcaccgccaggtgcgaataagggacagtgaagaaggaacacccgctcgcgggtgggcctacttcacctatcctgcccggctgacgccgttggatacaccaaggaaagtctacacgaaccctttggcaaaatcctgtatatcgtgcgaaaaaggatggatataccgaaaaaatcgctataatgaccccgaagcagggttatgcagcggaaaacggaattgatccggccacgatgcgtccggcgtagaggatctgaagatcagcagttcaacctgttgatagtacgtactaagctctcatgtttcacgtactaagctctcatgtttaacgtactaagctctcatgtttaacgaactaaaccctcatggctaacgtactaagctctcatggctaacgtactaagctctcatgtttcacgtactaagctctcatgtttgaacaataaaattaatataaatcagcaacttaaatagcctctaaggttttaagttttataagaaaaaaaagaatatataaggcttttaaagcttttaaggtttaacggttgtggacaacaagccagg

What is claimed is:

1. A construct comprising a plurality of nucleic acid sequences encoding
a first group of one or more regulatory core domains;
a second group of one or more regulatory core domains;
one or more DNA binding domains, wherein the first group of the one or more regulatory core domains and the second group of the one or more regulatory core domains are each linked to one of the DNA binding domains; and
one or more DNA operator elements, wherein the one or more DNA operator elements are each specifically recognized by one of the DNA binding domains.

2. The construct of claim 1, further comprising SEQ ID NO: 31, SEQ ID NO: 32, SEQ ID NO: 33, SEQ ID NO: 34, SEQ ID NO: 35, SEQ ID NO: 36, SEQ ID NO: 37, SEQ ID NO: 38, SEQ ID NO: 39, SEQ ID NO: 40, SEQ ID NO: 41, SEQ ID NO: 42, SEQ ID NO: 43, SEQ ID NO: 44, SEQ ID NO: 45, SEQ ID NO: 46, SEQ ID NO: 47, SEQ ID NO: 48, SEQ ID NO: 49, SEQ ID NO: 50, SEQ ID NO: 51, SEQ ID NO: 52, SEQ ID NO: 53, SEQ ID NO: 54, SEQ ID NO: 55, SEQ ID NO: 56, SEQ ID NO: 57, SEQ ID NO: 58, SEQ ID NO: 59, SEQ ID NO: 60, SEQ ID NO: 61, SEQ ID NO: 62, SEQ ID NO: 63, SEQ ID NO: 64, SEQ ID NO: 65, SEQ ID NO: 66, SEQ ID NO: 67, SEQ ID NO: 68, or variants thereof.

3. The construct of claim 1, wherein the plurality of nucleic acid sequences comprises any combination of SEQ ID NO: 1, SEQ ID NO: 2, SEQ ID NO: 3, SEQ ID NO: 4, SEQ ID NO: 5, SEQ ID NO: 7, SEQ ID NO: 8, SEQ ID NO: 9, SEQ ID NO: 10, SEQ ID NO: 11, SEQ ID NO: 12, SEQ ID NO: 13, SEQ ID NO: 14, SEQ ID NO: 15, SEQ ID NO: 20, SEQ ID NO: 21, SEQ ID NO: 22, SEQ ID NO: 23, SEQ ID NO: 24, SEQ ID NO: 25, SEQ ID NO: 26, SEQ ID NO: 27, SEQ ID NO: 28, or variants thereof.

4. The construct of claim 1, wherein the first group of one or more regulatory core domains comprises at least one repressor or at least one anti-repressor, or a combination thereof.

5. The construct of claim 1, wherein the second group of one or more regulatory core domains comprise at least one repressors, at least one anti-repressors, or a combination thereof.

6. The construct of claim 1, wherein the first group of one or more regulatory core domains are specifically recognized by a first agent.

7. The construct of claim 6, wherein the first agent is isopropyl-β-D-1-thiogalactopyranoside.

8. The construct of claim 1, wherein the second group of one or more regulatory core domains are specifically recognized by a second agent.

9. The construct of claim 8, wherein the second agent is D-ribose.

10. The construct of claim 1, wherein the first and second group of the one or more regulatory core domains are linked to a same DNA binding domain.

11. The construct of claim 1, wherein the first and second group of the one or more regulatory core domains are linked to different DNA binding domains.

12. The construct of claim 1, wherein the construct comprises a plurality of nucleic acid sequences encoding
a first group of two regulatory core domains;
a second group of two regulatory core domains;
three DNA binding domains, wherein the first group of the regulatory core domains and second group of the regulatory core domains are each linked to one of the three DNA binding domains; and
three DNA operator elements that are each specifically recognized by one of the three DNA binding domains.

13. The construct of claim 1, further comprising a nucleic acid sequence encoding a reporter.

14. The construct of claim 1, further comprising a nucleic acid sequence encoding a dead Cas9 endonuclease (dCas9) and a single guide RNA (sgRNA).

15. The construct of claim 1, wherein the nucleic acid sequence encodes any combination of SEQ ID NO: 6, SEQ ID NO: 16, SEQ ID NO: 17, SEQ ID NO: 18, SEQ ID NO: 19, or variants thereof.

16. The construct of claim 1, further comprising SEQ ID NO: 69, SEQ ID NO: 70, SEQ ID NO: 71, SEQ ID NO: 72, SEQ ID NO: 73, SEQ ID NO: 74, SEQ ID NO: 75, SEQ ID NO: 76, SEQ ID NO: 77, SEQ ID NO: 78, SEQ ID NO: 79, SEQ ID NO: 80, SEQ ID NO: 81, or variants thereof.

17. A cell comprising a construct comprising a plurality of nucleic acid sequences encoding
a first group of one or more regulatory core domains;
a second group of one or more regulatory core domains;
one or more DNA binding domains, wherein the first group of the one or more regulatory core domains and the second group of the one or more regulatory core domains are each linked to one of the DNA binding domains; and
one or more DNA operator elements, wherein the one or more DNA operator elements are each specifically recognized by one of the DNA binding domains.

18. The cell of claim 17, wherein the cell is a bacterial cell.

19. The cell of claim 19, wherein the bacterial cell is a species of Bacteroides genus selected from B. thetaiotaomicron (Bt), B. fragilis (Bf), B. vulgatus (Bv), B. ovatus (Bo), or B. uniformis (Bu).

20. A method of modifying a gastrointestinal tract microbiome in a subject, comprising
administering to the subject an effective amount of a cell comprising a construct comprising a plurality of nucleic acid sequences encoding
a first group of one or more regulatory core domains;
a second group of one or more regulatory core domains;
one or more DNA binding domains, wherein the first group of the one or more regulatory core domains and the second group of the one or more regulatory core domains are each linked to one of the DNA binding domains; and
one or more DNA operator elements, wherein the one or more DNA operator elements are each specifically recognized by one of the DNA binding domains.
